United States Patent Application Publication US 2026/0058010 A1 - sequence listing, part 12

SEQ ID NO: 132 - DNA, 2062453 bp, Homo sapiens
  source 1..2062453: mol_type = genomic DNA
gtcagtcccagctcaaccacatgagtgtgattcccccacgcccagtcggggacaatcgaggaattgtgagcaatgctcattaaagctgattgtcatcaggaggagtgactcccagggaaactccaggtgccagtcccacaggagaagaggacgcaaactgggtttcaatagccacagatgtccgtgctgtggatggtaacacggtcgcctattctgcagcctttaatacatcaaataattatagaagccccatattttttaggaaagcactcaaaccgaggcacagagcaagacagattttatttattattttaaagaaccgtagcgtgaaacacactgtgggatcactactttcttgctgcccccgaaagcttcaactcaatatgttaataactcacaagggtgtattatgtatgagcattctgtggaatgtgaaaattagtaatagagagtacttatttccctttgaattcttagctttggtaattatttactcaatgaagcaaaagaagattcacaggtagaatgacagaaaaattcagaaaaaaaattggataagaaagggaatattggatgcatttcataatgtgacggtttcttgaaaaatgagaaagttgaagcaagagaaacctgacctgtaatatcagctctgcctatctgtgtgtcgttgggtaaaccaaccaacttatttaacttcctgcttcttcatctaaattatcaaagtggcaaaaccctctcggttggattatgggggttttgcaacgtctgcgagtcacaaagtgcagtgtctcgcgctcggtatttcctcaataaatggcacctaaatgcagttgctggccagcaagactcagattgcaagttggacatcaaaacttggtcgctgcgaagccaccgtgggctattttggaaatattattggttgtttttcattttgtaataacttgactctcagagaaagtagtgtatcattctgttgaactgcaagacattcggcgtgatgggccaccaaggacgtgtaaagcattgtgttttctgtcagcccagaaatgaacgggggaccgctggttctgagtttaaaaagcggtttgatttttttgagccttctttaaatgtgttatttggagtgctctgttaagtaggtctataattctctttcatgtcatttttttagtgtggtgaacgtttacaaacagagctcccaaattgaaaagaaatcataaaaaaacataggttttggtttggaggaaaccaagttttcttaccgtttttaatgtgaaccatcaagaaatctgtcagcttcaacgttactattctgtgtctcatggttcctgctaaatgtgctattgattaatcatgacgatgatgtgaatgtcgtgggaaaaatatggagcttcattttgaatatcctaaaggctcattatgaagactcccattccttccctcccctgcaagggactcaggtgcgcatattaaagtgaaaataaattcacacagaaaaatagaaatctaaaattaaatatttaattagaactctgatttgctttaaagattggtggcattgcacaggctatattacaccctctttataatttttttgacaaaaaaaagatactgttcattttaacaggccactttaatattaatacatgtgtaataggattggaactgaaaatcagctagagatggtacattttacattattgggaaaattacagttctgtattgtaaaaacatttattttttaacaatgtacctacattaatcaaaaaattacagcatatttaataattttacaaattcttcataaaaaatatatctctgtacaaaaaggtctttcgcacctacgtcgtgacagcagcgtgtggtgggacgggagggagggtcggcgatgacaatgggttttcctgatcataatgccagcgttcttttttttaccccctttttataatagctttttgttgttgtttacaaaatattttacagaagaaaaaaattattgcagctagcctgaaaaaaggcaagatgtgtgtgtaaaacaagcagcagttttaaacagctctgaagcacgtgtcctctgttagtgtgtggtcgcgtccctcacgcgtgttcccgttgccttcagggaagagtcttctagacctaactcagcaagcacagctcctgactgccctaaaatgagatcctccaacaccttgcggagacgccgttcaacactgcacacaaccttaggaagaaactaggcagaattctcacacgagaatttcactgattttttttttcatttaaataacatgcttcaaactggcaaccctaggacagtttgactttgcacacaaaggaaaatcatatctaatttgatatgtggtttcttgtatgtatgtatgtcctgtcatttcaggatttcatagcatcgttgaccagggagcaggtcagggatatgggaacagagatgttaattcagactctgaagtcagcattttgcacctagtttgaatgactcaaacttagatatgtacaatatatatatatatatatgtatgtatatatatacactaatatgtatagtaaccctgttctcccttgcacacgagcctcctcacactttcaatcatcttctgtttcgttcaatgtgtgtgttaggagcacgactcccgctgacctcgtcccgtctactgtgaaacagcaatgtaaggattcccactggcaaagcaaatctccaaggatgtgggcaggttggccagggaaaactgtgcagagaattcagcataatgatacagaatccaacagcgtggggttcacaagacaaaggagtccctaggagaggccagtgagtccccaaacagcagagaccctttcgaccgaggaacacaacactgggagccgagctctacggaaatgtccgaatcaaaacgcgtgactctccaaagaatgccccattttcctgactgcttttccttttccacatttgaagtcctacatggaaaccttcagtacaccaacagataaatcagtcttaaagctaggtgtcaatgtgttcactccgacaacgtgaaggccaatttgaacattctgacatttctattaccaacgccaatctaaaatgtgaaacagagaaaatctgccacaattgaataggaactgaaatatcaaataataaaataagtactatcgtttcaaaaatatttttatcaaataagtataagtaaaagtaaacatgattttcactttgaatttgttacataaactacctcacggccacatcttctacttcatgttttgatttttatttgccctggggatcttatagattttatttgcatcataacttatcatttacctataatggaatttaaacttgaaaagtcactgaaattacctttccatctggaatcataaagcatgaaacaaataacaaatgaatgtataaaatatatcattgtgagaggagagtgtgtgtactttttccttccctctaaaagaacacttggtattttgatcctgaacaattttcactgagttcaaggtgctactgtggtatattgtctttcaatgcaatatcaaagatcgatggcacagtaaaagacaaaaaaaaaaaaaaacaaaaaaaaaacactgcaaaagggaaggctgcattgtgagctaaaacccacaagttcatcgactatctaaaataaattactattcacagttttacatggcaaacagaaatttctgcaaaccccctgctattaagtagtatcagagagacagtaattggatgaggatggtactaaaggaggaaaacgtgtgaaataaggaggcttctgtttttttctcattggacctcttcaatgaattcaacacgtaaatggagctaattgaagcaataataaaataaatctcttcaatactgtatttccttttaaaatctgtgccatatctaggaatacttttccctaacactccaactaagctgatgggggaatgtttagcttgataatatgaaataatgcttatatacaatggatagtgtgtataaaccctgtgtaaataatttattttttttatcagaatcttagtcattcataacacactagtgcaaaaaattgtgcattaaacattctgcgacagaacagctgactgggaaattgcaaacatccctagagatgaacacacaggggagctgtgaggtcctcaaagcttgtcaggtctcggaaggacagagtgaagcatttgtaggtgtgagcctctatcagaaaggtgtcttcttccagaaagctttttatttttttcagagtattcgtgttcatgggggtttaaaaaggaaaaacaacacaagagaacacatatcgtggtgccaccattctgtcaccgcacctgagggacatatccacgagcccagacgattgcattgaaaggcatctcagcaacacagaaatatgaaagtctgaggcattgagtatgacgtgttggcgcgacgtggcagtcttcctggagtgtgccttgatttcatacagatgcagccaggcatttagaacccacttttggaatgaaaacgcatgtgtagtttgatccgtagaagaccctgacacatttgagtagagatccccgctgcacttatgccagtagacaaggttgaagatcgctgcagtaaagccagagtggaagggagagtggtatatggcaccaaaggaatcactgcttgtccatcagaggtatggctatgaatcagtcctgttggggcactgagggctataccactgtacagactgtgttcagagttgtgtcaaacctcacagccttggcttctgtgggttttaagtttgtatcatacatggggttttcaaacgatgcttgtccattgctgttttcatgcccagcatagccattgtattgaacttttggtctcgttctaaggaaaacagaaaacaaatcattagaatcctggtttcatttgcagatttagcagctgggactgtgtgcaggagacaacgtctacagagcagggagcagtatagccaggacgtttgcaaagaaggaaggcatccacacctgcacacctgtcagtttatttgcttaaattggtgattgggagtataaaatgggttttaaaaagtgaatcgatttcaaaaattaaataaaatttttttgagacagggtctcactctgttacccaggctggagtgcagtggcacgaccaccactcatttcagccttgacctcttgggctcaggcgatcctcccacctcagcctcctgggtaactgggatcaaagatttacttatgcttcctacaaatgccccagggaaatcgggaaggtcccaaaggctgaatcggattggttttgttttggatgtctatttatcactgataagttatacggccttggttaagacacgaaactttctactactctgtaaaacagggttgtgggcatatgcctagcctttagcacggtatgcttacactaaatttcaagtttaagcttttagttcactgtcgttactaatattcacaaaaagttattttttattttgcctctgttgagttaaaaatgaatctttataaaaaaggaactatactcattattaaactgttgtcacattttctggttaaaagaaaacccctacgtacaatctatgattagagaattagaggattttcagactgaaaagacagaatcatgtctggtctgctctgtctctgtttattctttccttattccagaagaaatcaggtaagaaaaatgtgccacgtggcaaaaccagaaatttaatgtacataagcacgctcgcaaaaacatcatttgacattgggcgtcaagaaacttctgccgagacatttactagatttccttatgttacacatgctcattaagaaaaagagaagtacgtggcacatggctctgagaaaaaggcagaacagcactttgtgactgcccttggagtgggagaggtccgtgacattgtgcttggaacatgcgccagcagtgatcgttagcaaacaaatccagcccctcgtcaatgaagtgaagacctggctaaaatgttcactcaatcgtccagatcacaagctgccacagtcccttcatgtgtagggaaatgcaatcccagagtggaactggctgcagctggatgctgacgtgcaggtgtgcagctgcacccggcagaaggctgtcagcaccttgggctctgaggaagcaactcccaacatgcaagcaacagactcagaaatgagcagaaacagggtttttctggaggaatgcagagccaactcatcaagaaatatttatctctttagagcctgagaagccagtgtagagagtgctacaggcttggtgctttcctgaccaggtggtgagaacttgaagaaaatggattgatgtgctgctggcaactgagccctgggcttccttgcttctacaaaaattccaccatccctcgctcctatggcacagaagtagagaactaaaagacccaatggattgagaagtcacagtggcctcatagccgtcctcttgagaactgtgagagggaacagcttccttcatattcaacatgcagggcagcctcttggtcttggtgcagtgttaggaagggagggagtccagttgtgatgacgacagattccccaccgacccagaggaggcatcacatttacataaaaataagcgctatctcccttatctctggctctgtaatctgagatctctttccaaggcaccgccttcacggagacacccaactactcagcattgacagggaagtttctaaggtttaacgactaaaactggtgtgtatgttggatatagcccccaatgctacattgccttaaagttaagatataatcagaagtgatatttatgtataaatatgcatatataattatgtggggttatctttttaaaggacaagacaatcccagtcttatatgaaggtttgcatctttgcaggcaagttgagggaaaacagctttaatggactagaccttttccttggggttaatgtggatgccaatcaaaagcaaaaataaatttgtaggaattgtaagttcctacatatgtgtctctataaggatattatatgacccagaggaacccgtgaaagaagatacatttttgtgtatatccctttaagaagagaagctcatctgatcatggcatcttattggagaaggtagtggcatatctttctacatttactaaattttaaattagtcctgagcagaaattcaaggataaggctcatcggacttgtgtgtattgggtattttctcttccaaaaaattaacacagatgtgcccatctttaattttctaaatatcatctgaaatgtttttcattgagtcatattcttaaagaaagaacattactagccatagggaactgaagacacaggcacaagcagctaatacacctttgaagcaacattttctctactgtgtatttcaaaagtgaatataagaaagcaaatatttaaagaggctatttcatgagttttgaaaaaataatatcatgacagtttttctgttttaaccagaattaagtgaaatatctgtattatgtactgatatttatttaacctatctaattttatttcaggggatcataatttatttcttattatttgtagttaatgctaccatttcaaatagtattttagagtagtttggcatttccagattcctccaggtaatgtattatccatatatggaaaaaatgtacaaggagtttatagttcctccaaaataattcttttcttctggcatccacattaatcccaaggaaaggatctggttcactaaagttgtttgtccccaagttttgacattttacagttagcagagttttgcaaattgatgggtattcagaacactttttcaagagatggaacatctatattgcttactacatataaagagctaaatttgtatttgttgaagaaagaaatcaatgaaacatctatcaatcacagattcacagagttgaaagtggccatagagaacattctgttcacccttttgctggaaggttgaaataccttctaaaggttctcatcgttggccatggagcctgaatgtagagatagaatcctttatttcatctttcaattgaacatgaaagaaaaaaacatattatttctcaactcagtcatttattctcttatttcttagatgtattctgcttaaaaagtagggcagaaaacaacagaaaggacaacaaaaaatcttgacaaataagcattgttagtccaagaaagagcattgctctcactcatgagtgggagctgaacgatgagaacacatggacacattgaggggacaacacacactggggcctgtggggggctggagggagggagagcatcaagaagaacagctgatgggtgctgggctgaatacctgagtgatgggttgatccatgcagcagaccaccccggcttacatttaactaggtaacaaacctgcacatccggcacgtgtaccccggaactcaaaataaaagttgatttaaaaaaaaaaaaagaacattgcatagtaatataaaatacatgtgcatgtgagcacgagagcatgcccattactttaaacccatagtttacactcacaacattctcaaacagatggtgtttctgcagtacctgtgtttgtagaggtaaaatgcaaaccctgataaaattagagcaaagaaaggaaccagaatggcagccgccacagagccactgctggtgccgtggtaatgactggaagagtcttgatctgggtttaaaggatctgtaagataaaggaaatattaaatttgttgttactgtactctgcttaaacaaatacatatgataaattttgtaaatggatacgaactcttcaagaagcagacggagttgccatttcacaggaaaccaaatgatattcttttctaaagatttttaatatccacttaatgaccgggacaaaaaactgactatttcctactaataatggagaatactatgaaagagtctcaacatttaaaatgtgagaaaggcaaaagggtcagtatacatcctgactttcgtttatagttataggtgttttcacaaaactaactgaaaacatttatgtattttttctatattcagaggtcaataatatttgctgttttttcaggtcttaaggccagactcggcaaaatatgtcattgaaattatgtaaatatcccagttatccataaaaatggcattgcattcttcatatgtgaataggatggtgtcatctgtctttattttacgtacattctgaaattcacagaagagtttagaaatactcaaaaataattatagttcaatgtcacaatgcaagtttccatgaagacacaaaataatgctaaaatgtaactttttaaattaaataattaatttttctttttttttttttctgagacagagtctcaccctgttgcccaggctggagtgcagtggagtgatctcagctcattgcaacctctgtctcccaggttctagtgattctcctgcctcagcctcccaagtagctgggatgacaggtgcctgccgccatgcctggctattttttgtatttttactagagatggggtttcaccatgttggccaggctagtcttgaactcctgacttcaaatgatccacctgcctcggcctcgaaaagtgctggaattacaggcttaagccaccacacctgacctaaaatataccttttgtccattagaaaggaaggcaaatgtgaatacttcaagtatcatgaaggtgatagaatcagccaggactatggagtgtctcatggcatggcactgagaggaaagcaataaaaactcaaatccacagacctttattaagcaactgttgccaaaggaggaagtaagtttttgaagagtgtactaataaaatataattttgagatggatttggcctaattgcatggagtcacttaatgcaggtgtgcaatgaatcatgattggcgtcatctcaatatagcagaattgttgagaagaagctcatctggttttcttatttccagaatttataaaatgtcagattcaaagagatgttgctgtatttattgttttataaaccagaaatgcaaaaaatcaatcaaatattaaaaatctttaaatcattatttgtatcaacaccctttaattttcatataaaaactttcaaatgacattatttgccatttgcttcaatagatgtaggattatgactgcctacaatattaacgtccaataggaacatattttggagcaatgttggctttttacaactacttatctttttgagatctgccccaccatcacgcaaaaggaagatgccagacacttgctctcttgcaatctgagcacccaggttatggacgtgcagcgagtgaagccaattgggtgttcccaccccaggcactgtattggaagcgagggacgcaaaacattctgagatggtttaaaatttgttccatggctgaaggggttctagagccctggggacaacatgaagtgtgtgtgtatgtgtgcactgagggtggtcccagcagcagcagtggtgcagcagtgatgtccagtgacaaggggtggtgctgtccaacagagagcagtggtgccctactcagatggcaccaacttcatgggttggttgtgaaaatcatatgttagtacatctcaagtgcttacaacaatgcctggcacagagggaatgttcacacggactcatagtcacaaaaatgtaactttcctgaagccagggattttgttttgttttgtttggtttcgtttggtttgggtagctttcctcttgactcctcagaacctgcaataaaacctagaacacagtatgtgctcaatatatatttgcaaaattaaaaaaaaaagttttgtctgtatagcatttcagcacccaaatatcttttagtttccattacgatgccaaacattgatcttcaagtttctgtaattctgggattatctgtcttattcttataaatgtgtattctacttacattaaccacagttactttttttaatctgaaaacaaagctacatacttttatccataatagataacaaaattccaaataataaaatgctggaaaatctacgtgtcacaagacacctcacatgaaaacaaagaacaacacgtaagaaggtgtttgtgaattacataaccaaacttaccgtgagattatcacatgcctgcagctcctagttaatttcagttacttgccttgttttaataatttgaaggttaatatacacacattgtgttaattaaaatggcataaagggatatgaaaacaaataatataaaggaaaattaaaataatcattccttgccctacaaggtagttcctctttatagttgagggttttaaaaattgtccttccaacaatgtactcgtaatatgtgtgattatttctcttttcttatttttataattggtaatattatttgcattttgcttatgtggcttttaaccttaacagtctatttatgaggctcttccattggcatatatgaatcagatttaattttttaaggtgtgtagtattctactgattagatataacagcatttatttagccagtctactgtccagggacattaagggtgtttctaatacttctataatgttgcaatgaaatcttttgcctatatctacacattagcaggagtcgacattacataagacaaatcttaagaagtagaattattgagaaacagaatttgtaccttttagtgttgctacatcctacctaattgctctctaaagaggcactgcaatttcattcaatcattatcgtacgagggtcttcacaataacacatggacagctctgtgcgatccctctgctaccctccgttcccttctcttccccctccttgttttcccctgtccctcctcctctctcattgccctccttccacacgttattattggttccttggctgttgcaaccacaactgttgctgccactactacaatgataaatcaaacagtgtttaggtagttataaatttacatttctttactgaaggagggtgagcatctttgcacatgtgataagctaggtcattcaattttctaaagagcattattgaaacaaatgcacatcctgtcacgcaacacttcatgttggggatacattctgagaaatgcttcgtgaggcaattttgcggctgtgtgagcatcagagtgcactcacacacctagacggtgttgcctactgcatatctaggctataggtacagccagtggctcctacatgagtaacaccgtgcactatgacattatggcagctgtggtgtcaccaggtgttaggaatttgtcagcttctttataatcttatggggtcactggtgcatatgcgatcttttgttgaccaaaatgtcattatgcgatgcgtgactgtcctatataattcatccacttaagctgaacacacaatccaaggctttctcagtgttttcatagggtggtgcaatcaccaccgtagtctcacttagaagattggtgtccctccaaaagaatctcagtatctcttagctttattcttcctctaccttcatcccaaccttcaacccaggcaaccactaatcagtgtcccatctctttggatttgcctgttatggacatctcctgtaatggattcatagactatttggcctttttttatctggcttccttcacttggcatgacgttttcaaggtccatccttgttgtaggattcttcaatactttattcttcttcagtgctgactaatattccattgtatggctatattacatattgtttattcattcatccattgatagacattttggttgtatctacatttgggttattataaataatgctgctctaagcattcatgtacaagttttgtgtgacatatttttcagttcttttggctacccatgtaggaatggaattgctggagcttaagtaacaactgtttgatgaactaccagagtgttttccagagcagctgcatcatttcacatttccccagcaaagtaggacagttccagttcctccgcctccttgccaccctttgcgatttgacttttagatcacagccatccttgtggacatgaaggggtatcccagtgtggttttgatttgcatttccctgataatgattataatcaacatcttttcatgggcttatcgccatttgcatgtctttagagacatatctattcaaatctttggtcaatttcttatttaggttatttgcctctgtattattgagccataagagttcttcgtacattctggatacaagtcacttatcaggtacataattttatgtattttctctcattctttgtgtgtatgttagggttgagtcattcaatcctaatgaggaaaccagtttattgttgagtttcttacgcaagtttttgcattaaatttgtctttcaaattaattttattttagtatccacttaatgacaatcacgttttttggtttatctactgactagagaaaattaggaggttatttttatccataaaaatagatgcttgccatcattcttaaatgaatggttgctgttgcagaattacgtaaacacaaacttttctaattagttgaaggggggacttacttatgactcaaattattttgtaaagtaaactgtttttcctgacaacaagctcatcatcacatgagaataaaaatcccttgttaaaccaagctgttattttgttagattaaaaagaaaaggggtaatgcaaagaaaacgtgtaatagcaaactgatagttcaggtcaaattcattggatcagtcaacttagacatctacacagcatcctgtacagctcactggggtgtccttcaacaaaattactagagcgtgtgctacagagagaaaggaggacaaataactccaggattcggcttagagcaagagaaaaaacatcacccatcattagtgttggtctaatgcatttattccatttcattacctcaaaataatataacccaatttaacatataatctcagccactgccaacattataatgttcttctatttaataatactgtgggttgaatagtggaagtaaagtattttatgattaattatcctttttttttttttggcttttctacaggccagtagactttttttatattcagcactttgataaaagtcttacaaaataagttcatcagtggtaatcattacaaaattgtacactcacattcctccaaaaggtggctctggtatcaaagcctatatggtaatattcttctttatagtaatactgtgtgaatagtattctacaagtaggagaaatatggtgccaaggttgttacaaaaatgcgtttccttttatttgtgggttgcaacaattataacgacttttgtgcaaaaagagctgtagcatgcacaaagcaatgcttacgtggcctctcaatctcgtaacaaccttgggaacttctatactgagatttaagatgaagaaataggctcaagaatattgtgacccatcctagatgacaaaaataggaagcagacgaggtagcattcagatctgatgattgtttccacatatgttcctcctttaatcactaaggcaaaaatcaaatagtacagaaagctataaagaaggaaggaggacttacctgtctatgtagaataagctttttctcatttataagtcaaacctctttccacatcaatatatagtcctcatttctttaaataaatatactgaataataattgtttcataggtagtataatttgttacataaaaatactcattgaagcaattctttcagcatagatgggcaacatgcggaggttatttctaagttccactactaaaacaatcctgctttggacacgcctgaatatgcagaaaacaatttacacatttgcctgattaaaaattctagacagaaaattgttggatgaacaaagtactgaccaattgtatctacccatacatccatcaaaattaaacatgagcatcttttcctgctatcaaccccaaaccaattattaaaactttgtcattctgataactaaaaataatcatctttgttactatataaatatatatatgtatatttctgaagatctttttatatgtttgttggccacttttaattactcttactttttttttttacttttaagaactcttagttttctttgggtaatatactttgcttatactttgattttcatctttttctctcttatttttaatagctcttgatatagtgaagatatgatgtctggcacatttattgcattatttccggctttgtgtttgtgtattttgctattcaaaataattttttttcattcagctgtaaaatatgttagtctctctcattatttttgtttaggtttcttttagagtcgtcttttccatttcttcttagaaacatcattggaaagccaaactgatatttgctttaaaatatatcctaagtgcaacttaccttgcctttctagcttaaattttccaaagtcttttccatgaatgtcaccttgaaaagtaaatcctcctctttcaagtccagatgacacctgacacataggaaagaaaagaaaagaaataaaaaggtatacgaagggatgaataatatcctcttttaatatatcttttaatacaactgttatatctcatatttagatactactggttaaatgttttatttttgccatggcttttggtgacacatttatagttaaagatcagaaaccaacacagaagtgaactttaactaacatatgcaaatgctcacaatctcattttgatctcgaaaatgatagcaaattttacaatatatccatatgttaactgcactttctaagggaacacaaacgtatgaattaagaaataatctacattatgtaaaactcactttgtgtcccagctattgggcagggtacatcatgtatggctgtctacccttaagtcagatagtaaattagaacacgaacaaatggttaacttgcaaagaacggtgttaagggggatgtcttaaatctttctatttatctgggaatgatttcttttagaacgagcagcgtggttatcaagcggtcttggaaaatttctgatggcaccactcacgatataacgtagcagtaacatcatagaccctggatttcaggtcttgttctgtcctcaacagtaaccacccctttaaggatggccagttcattgcttacttcttagacctggtttcttcccttataaaatgaaggaataaaatggccactctgtcaagaagaggggcagctgagttttcaaggggcagacacaagacagctctactcagaagcctccaatccgtagcccttgcatctgcacagagagatgattagaaagcctgtgctttgtcacagaccttacacatgtacttacataaccatctagtccccagttgtcattttcgaacttgcttacaaaaatatctgcctggcctttaatttgaaaagctttcaggagtaagtgggcctcctccttcttgtaaatgcctgtgaaaagatcagcagtttaggcttaccttggagaaagttagtaattcagccctttaatccatttgatgtggaatgtggtacggagatgataatatcatcgataatagaaaactcaaacagaaattgtatttttatttgtgaattttagcttaggagcttccattttcccctgaaaatcacttcttaaatccttgtctatcttgaataggtataatccactccactaagttcaatatccttattccacagaaagaataaaaaataacatatttgattttgctaattaaaaaatctctctctaaaaaagtatacagtaaaaatacatcacagaattaatgtaagaatgaaaatgataatacacatacagtgcttaaaatagtgtttgccatataaatcgaggctgttttattttattaattgtgtgatgattttaaaaatctcatgaagagcacatgagttaagaaaaagtattaagaaataaagtttggagacatgcagtatctgtatacgaatctcagattcttgacttaatatgtgcataattttgagcaaatcagttcacttttctgtactcgttttgtaatctctaaaataagaaaataataccaacctctcacggctagggagaggctccaatgagttacagtatatacaaagccaacagaacagtaataagtacttaatacttactagatcacctctctgtgaaaagataacaggtctatttctgctcacaccatgcgtttagtgaattcttcgggacctacctgtcaacttcagctccactggcgaggcttcgctgaaggtggcattcaccttactgcttgttgcattgaaccagtcaacagttagagtggcgggttgtcttttccctaaatattcataataccccttccacagtgaattgacgaaaaagacatctgaaggaactgtgggaaggggggaaacagaccaatgtcagcacacacacaaacaataaattcagacattattaaacacagaaggcatcatactgcttagcgagcgatcacagatgagggcagtgatgaagacaagaggagcctagtgcatcgctgttcacagcacgtgcaaaactcaaaagaagcaggtgcgaagattattatggtatgcaagtagacacttgtgcttatgggtttcttttattattattagaagccaaagcatacctactttaacagcccttccaagctcatgggctatggtgaactggtacttctaatgctagtttagtttttattgtgcttagcaagaaatatgtttacctgacccatgaaatcactactgatatttcaatgatatccaagtctactctttgaaagacttggaaggctccaaagaactgatatatataatacgagagcaatgccctgtctcgaaaaagcttacatatcccagcaccaagtggacttatgaagacaaagccctttcacttcagagtctttattttgtaagtagagtccctctctgtcattcatactcttctgttcttctttaatctctttatgtaatatattccatgagtaagaagagatgggctcaataatttcaaatgtttcttttatacatgtcttttaaattcagtaatgaaaggcagtctttttaaagcacagaatccatcgacaggaaaacttaacaaagattattgagatatttcttcttgttttcacggcttaagaaaaaaataaacttatttttcatgtgtctgtttaaaaatgtgtataaaatcctgccattttcacacataaacgtgaattgtagtgtataaattcacatgatgatttcagcattactctttgttttctgccttctgatgtgcatgaattatttaattagataagattcatgataagcataattggtcaaaacacattgcttgagttgctaggtggaaatgaagattcatgtctccctaacccattttttaaaaagtccatttatagtcgcaaataatgaggacaaaagtatattgttcctatacccatgcttttctttccagcccaactggccattttcttgttttcctaggcaggctgaacctataaaacttggcctagcaagagaagggttaaagaggaacagaagataatagcttcctttggccttttgtagaccccactttctcataataatagtgataataaaataagtaaaaaactcatatatccacacaagtatctaacacatttgcttataaatcactgattttagacacatctgcttagccactgtcagcacaacagaggcccccattttaatcagcaacctcaaaataactttattttccattactaaaattaatagcctttaaagtacataaaaaatatcttccctaattagaatttatatgctcttctgaagttactaatccacttgttcaagcattcacttaagttaatcttgttgaagtttcacaggaatgggccaggcctggctgggtagggtaagatacaaccaatgtcttagaagtggcttctgtgtattaaaataggaccacgagtcatgtggcagaggtcatctttctgggtctttataatttcacttgttgctggcagcccgcagtacaatgcagcagccacatagctgagctgtactagaatgtaccaccatgatgaggaatcacattcaattagcacttgctttccaagagtacaagaaaaggaatattgataataatgtttgcacctacaaaaggagtgtatagatatttcaatatcttaaacacaaaataagcaaataaaaaacaaaacacacacacaacaataataacaaaaagaggctgtgttttgttccattgaagaacatgttgcctggataaagagcactgacttctgtatgtgatttttaggtaatatttaaataaaatagtctagaaagctttaaaaagcattttatattctttattattcagattggagaaattcctttcatcatattggcacatttttccttgtctaagaattaaatgtgtcacacagcatcctgacaatatttttccttgtctaagaattaaatgtgtcacacagtatcctgacaatagcaatacaaatactctttccatgtttgattctaaaatagagcttatgtccaaaaaaaaaaaaaaacagtgttaaaacctgaataaagaaagtactagtcaagtgatcttatatatttacaaaggatttctgtttctgataaaacaacaacaaaatacccaacttaaattaatataatttgggatacattttgttatttaaaaataatttaaatttaaaacacagaacatgccagatgattttgtatagtaaaaactttccttgggaaataggactgcatctttgcgatttgctatataatgcttttagcaaaaggtgccacatacaacaaaaaactataattaacattttagaaggcaaagcatgcctagatgaatggagacacttggaaaaaaattgggctccatgtctgaactgtttacattaacaacttatgctgtgaaaatgcctcattgatatgagcttcctcatttggaggaaaaaagtcgcaaccctctttataaggctctccattataccacatggaacgaccaatgttttcatttctgcctaccaaatgccgaaggcaagtttgaatgaaacagggtgtgataacaccaaaggttttctttttaagggaagtaatgttatttcattaacaaaccattgttgtgaaataaacagaattccatgtaagcttggtgttttaaataattgaaacattaacttggtcgtggactaacggattcagaaatttaaatgttgaaaatagtttcactgtgcagagtagagaacaaatcactttattggattgaaatctagaactgttctggtatacaaacctggagttttagtaactgtttcattaacttctctcactcctttacctacaagtaaaaagacaaattatcattttaaaaaaaacatttatttttgagtaagtttgaaaaaatgtcaaattgaagcaattttcctttctccagatttttttaatgtacaaaatatgaataccttatacatatacattttaaactcatgtctttacagcagaatattcttggtgtttgtgggaaagcggagtttaaggatgaaaaatcaatgtacatctatctacgtatatttccatttaaagtgctacaacagagagccttgcaaaggagggtgccttctatgacatttcttgtatcctgtttggaataccctgccacatactaaaaggtaacaccccacccaaataaccatgatgttacagtccctcttcattgaccaataccccacccaaatcaatcaatttatacgttactactgaaaaattcaaaattatttccattgcagaatgttcattttggtctatcaagttagatttacgtcataatttcttagctttcacagttttagatcaaactacgaattaccattttaaaagttttcattcttctatttctaacagggaagggcaagggaaacaaaagtctctttaaaatccctaatatgagaactataaataggctccaggaaacaaaacctaaagtcactgactgtctcacacgccatcatttttggtttatgctgtttagactccatggatttataaattacaaacaggggagaacctgtaagtgtagctatcgtcaaatctgacccaggctgatgactctcacttgtaaacacacaaatttgtaattaatggatcgtttccatgtgaattgcttttgtaattttaaaaagcagaatcaatgtcagggacacataaactgaggttttaccacaaacagcatgtggtcttaaaaataagacagagtttcatttacctattctcggatacttggtgacctttattcattttcatctctaagaactacttttcctgaaactataccaagtattattttccttttaactcagaatgcttttctttaaccaaatagcttttctcttttggcttgaaataatgcaatcattttattatgtactaattgcatactaattgtactatatatttagctatgccaccattgcatcaaacactgaggatacacacgttcacacacacagctcacgcacatgaagcacgactgaggcaggtggcgatgctgcagcctcatgctcttacttatgggtctcacacgtggacactagcctgatgggcagctgatcctttcccttgctctttggaaaagtatgccactccttgatcaatgacttacttttacacacaggcgactttcctgtccatttcatgtctgctttacatgttctgtgctcagatccccctgcgaggaaaaagcctggatggcaggtgtacactaaggtgtagccgaaagtaggaagatcgatggctctcacatccgcgtgtgccggggtttctggctgtctgcaggcatgagctgaaacaacattaggaaacattgagactttgtttattgtaaagttagcacatgtgtctagagaaattaatagattaaaatagtttggaaatggttatgcagtcaatatgtatatatacatatatatacacatatatatgtatattttttttggtagagatgaagtcttgctatgttgtccagtctgtgctagaactcctgacctcaagctattctcctgttttgacctcccaaagtactgggattacaggcatgagccactacacccatcctatatatatttatacataggtaattatgtgcaaagatttagagatcacagctttgaaataaaaacacttctgctatactaccgaaataaatatgttaaagatccttaaaagcccagtcttataaattatagagactggtgaatatttagatatgccttgattttgttcttgtggaaactaccaaatttattactcaatttaattaattattttgataaaactttaatgtgtatttagaaacttaatatagattcttattttctttgaaatataatttaggaataaatgagactgtgatgtatactctatatctcaaatcactccattccttataaagtttgcatacatgctgcaaataaaggattgacatattattataaaacaagtttacaattttatttatttatttttatttatttattttttatttattttttgagtctcgctgtgttgcccaggctggaatgcagtggcacgatctccgctcgctgcaagctcctcctcctgggttcacgccattctcctgactcagcctccccagtagctgggactacaggcacccgccaccatgcccggctaattttttgtagtttttttagtagagatgggatttcaccatgttagccaggatggtctcgatctcctgacctcgtgatccacctgcctcggcctcccaaaatgctgggattataggcatgagccagcatgcccagccaagtttacaattctaaaattgtgcatgcagttgttttgaatgttgtcactatttcactaattagtaaccacaacaaatacctgatattatcaagctccatattatatataaacatgcatatatatatgtgtatgtatatacatatatatgtacatgtactatcaacatataatttgagtaatgatttagagcagagataattttaaaataaatacacccaaaaatcacaccttatatactgagatttttataacattctattaatgtttttatttttaatacagtaagaataagacaccgcatttcactaaattcagagtgagtgaaatgaataattcacatactactcatccatatattttttctaattctcatgattaagtcacaaaataaaatgtgatccttaagtatgtatttgaatgatcaattcatatatacttcctgttatagcaagaataattttttaaacacttctacttagactctgacatatgacgttattcagttcatcctctctttggtaatttgatgtaaatatcctaggagaataatagcacgtacaaataagttttccctctaagaatgttcaatataacattatgcacttatcttcggtttcatgcagtttctcagactttacagtgcctgagaatctcctggagcgcttgttaaactaaactgtcccccttctctcctccctggctccctccagaggctctggttcaaggtcaaggatggggcttgagagcagccttcacagcccaatgtccagccaatggttatgctgccagttctagggaaccaaactttgaggacatccgaaaatttaggattagggaattaaaaacaatttctcattatttcccttagtggtaaacacgtctcagacattcacaataaataggtgacttgtgatgggggtggaagaaatcacacttacgtatacattcggtctgtatcccactccatgttaaattggcaaggcaggtgcgagtcgtggaaccttgaatatggtagccttttctgcacctgaaaaaaaccgtgcttccaacctagagaggaaatccaatactagcttcagaggccaagggaatatacgaagtgtcaactagtgatacctgaaagtacacgcccgagtaaaagtacagcagcaacttttcaggttaatgtcaagccactgtctaagtcaacatgtacattttaactgcctgctacagtgttacacacaatgtagattgctcaatgaataatgtaagatcttctcgaattttgaaaatttagacggctgtttgggtaaagaaattatgccttttctgttttagagttctttcttttttgtttgtaataattattatttcctttttcatttttttcctgccactcacatttgaaacaactggtatttattagaaaattacttttgttagcattccaaggggattggtcaactcctactcatacagagtccaccaaaactctacctgtctttctgatgcttcaaactgtacaaactatttactgttgtctgaatgtctgaggcgtcttcctcaccaggtcttcacaaagctaacccccacttaattctctgtactttgcttaaactgcacatccgctgcagattcttctctgatcctccaagaatgaatcacattcagcttgaatgcatttccccaacgtatctgctccactcaccacagtgtcctggaattacctgtatatttattcacccatgtgtgttcctaatttaaccagaggtgccttgaggggcagattcctgtgatctgtaaatgtcttttttagagaatgagctatggtcgtgtgttgaggggcaccaaagatcatccatggttctgtgtatctgcagcatgaggccagcatgactcatgtatacagggagaggaaagcagcccccagggaaggcgggtttgcactcatcccagcttggcttgggaccagattatttccttaaagcttgacttatgaaggcacataagtgcaccaagttagcatccaaagatttgaattcccctcttgtttcttgctctgagaattttaaccagttatttaattccctgtgtctgccttctcacaggcataagcccatacctcccatgttgggattccgggaagaataactacaagtaaaatgcaaggaaatagttggtacactgaatagtgtgaaaggatatcaggagaaaaaaaatgctgcttctagcacttgataaagtggaagtatgaatttataaagaaaagtacaaatttatctaaatgtcaaatcaatagctaatttaagattcaatgatgggaaagcgttgactcatttactcttgattgattgattgattgactgatcgatttaaactttagagtcagggcctctctctattgcccagagtatacagcacagtggtgcaatcatagctcattgcatccttgacctccagggctcaagtagctcccatctcagccttctgcacagctgtgacaacaggtgcaccttaccatgcccagatgattttttgtattctttgtagaaatagggtcttgctatgttgcccaggctgttctcctggcctcaagcgattcttctgcctgggcctcccaaagtgctgggattacaggcgtgagctgctgctcccagcccacttcctctctatcaggaacggtgtccatcaactctccatgcaagcatgtttgcaattccaaccagacctcctggtaaacatgctgacattctcaggaaggtcatggataacctgtatcatttactggcagaaagaaaatacagtctccttctcaataattttttttttagcagaatataccgagccactgcaaactgattatcatacactaaccctggagctacgggtttcggggacacgctggctggagaacgggaggtagtcatttaagctgcaagattaacatagcctaacacagggacatttcacactgaaatggctcactttgtgtaagtaaggtttcagcatatggtgctaaagaaaacagacaaaaatctcattggttactttaaaaactaaaatgttcctaataaaggaagaaataaaaacatttggggagagctgcatttcatggtctcaaccttctccttaaaacatggtgtctgggctctttaaattattagtaaatcttgctgttggataaaatcaattattcgtgttagtgtaactaatttgttataaggagggtgaaggatttatccaaccctattagtgtcatatgataggttatagaactatgttgctaaatacagtcatcattgacttttaattactgtaagttgtacataggcaagttaagaattgctcaaagcaatggtgatcaaaattttatttttcttagtgaatcagtgagagcgacatccatatatagtattttccaatattccttgacaatttggcattaaatatttatatacctgaaagtatttacttgaagtttaaggcaatatttgagacataatagaaaatgtgctagagtcagtatattattagctccctgtaaggacttcccctgtgggatgcaagagagctacaaggaaatggccactctgtgtccgagcgagaacaatgggaatattttcgtgctcacgagagatggggaaagtggctgaggaagaaggttttttattcttaattgatgagatccctatataattaacttttgttttcaaagtcatccaaccagataacagtgaagttatgggagtacttaagatggttaaaacattttatttcaagcttcattaccttccacttttaggtatttctccaacgttcactgaagtgttagtgttcattttattaaaagtcaaatgaacgttccaaaatgatatttagtacgctaataattcatagaaatttaaagatcatacggagaactaatttcacaagtaagtttagactaaggggcttacatacattttctcctatttttatctctagaatttaatattatttccccactatatccagtccctaagtggaaccttttatgggtagctaatcagtgacaagttaccccaatctgagaactgccgtgagaatttaacagacaaataatagaatcatgcatgatttcaaatagaaaataatgtaatagttgctatgttaatttctatatgaaattatgcattattccattattatctagtaagcaagatatatatatatatatatatatatatacatatattgattttgacagttaaaaacacatgtagaaatcccctttgaacgaattttattcaggtaaatataacatgaataaggtatgatataaaaaagcactcacatatgtttaagtaacaaatatattttatatttccagaaagaaaacatagtaaattcataatgaactacctcatagcctctggagctattctgtattccaaagtgtggcgtaccagggtctgggcaggtgttatgagcaggatctgaaatttgtgatttaaaaagaaaagagggcaccagatatagttattgtgagaattttaacagctttcactaaaaggtctcatgaaatagagaaaatattgttttgagaaatgtgcaagatgtttttcaggaaagttaaaaattaaattgctacttttatcttctcttcaagacatgttttttagatgttaacttttagactttaagtagttcagtatgttcttcttatataagaataagtgcattttttttccattctctggcttttttttctatagaaatatatttggtcaatgatatactatcttcaataatgacctatcactatctttttgcttattaggattcaataattggccatctcatttggttacccattacattattctgagtttctttaattaattttcctcaacatttcaaaatgaaaaatatatttaatgcttcataatggaaccacatggaaaaccaagagtgacatttttcaaaaaacacaggacttgggtaacccagtggcacttcagctctcttacttgctgctctacagttaccagtagaaaaacaaaacagataacttcttaaaacctgttatctagagtgactaaccttctagggggaagaaaaatatttttagtgtagagatagctactgtatagcaatagtttaaatcaaatgacagcaaatattcttctaattagaaaaaatgcttcaatgacaatatttctttaatactatattttctaggtggatactattcaatttcttagaaaataatcaagactaagtattacttttttactaaaaattagtagaacacccattattctgcttagtaaatctcaatgaacaaaattaacccagcgataaaacttgactctgcagcaataaaacaacagcaagactgtctctctggggagggctgctttagagaatgttcctacctgcacctttcccctaaacaatgcaattggcagttaaggtagacagcggagagagccactgaggtcagagaacaaagtctagtagctactttagcagacttctgacttattttgcatgatttaaaagaggtggcacatcagtttagctgatgagtgcgcaatcctactcagtgcaaaaattattaccttgtacagaaaactgtctatggaaacactttctatgtaatcacaaatgacccaatttcggaatgaagcgtcctcatctccaaatactcccaggtatccccagagctgtatgataattattaccaatgcaggtgggttgtatgccgctccacgtgccgtcagcttggcagactcttctggaggatcccacgagtataaatggagatttgcactggaagaagacttcggacttataggtgaaacttttcccactaagtcgcccttctgcggggatgccagggtctccgcagaacacagctatggaagataaccaggaagaagtcagccttcaacgtccctggatcagcttcaccaattgagcttggtaactagtttctgttaaatctttagctttaactattaaacaagaaaaacgctaaaaggaggccaggcacggtggctcacgcctgtaatcccaacactttgggaggcagaggcaggcggatcgcttgagctcaggagttcgagactagcctgggcaacatggcgaaacctatgtctacaacaaatacaaaaattagctgggtttggtggcacacacctgtagtcccagctactcgggaggctgaggtgggaggatggtttgagcccgagagattgaggctgcagggagctatgattgaaccactgcactccatcctgggcaacagagtgaggacctgtctcaaaaaggagactctgcccttaggcaacacagtctcaagtttgagtttttgtgtattttagggctattattacccaccaggaaggtcctcagattgtaaccttaggatgtgccctggttatccgtccctgttgcagacctgcagtgggcggaacaaattctgctgtagaacttacggagacactgggggatctctcctttccacaccccgcgaccttcacaggagaggatggcggagtgagagagctggtaaccgtccatgcagctgtaacttatgctggagccccagcggaaatcacttccctccactgttccattctgcaccggcggcggctgaggacacagcacggctatttccaaagaacaaacaagatcaacattccggagctcccgctgcagcggtgatgttcaaacgattcccattttaattttacctgaattacaaatgacatctacataggtttttaaaaaaaaataataaaagaattgccaaggaagacagtacatcaaaataacaaaatattttttagaatatttcttcattaatatcgatgaagtctataaaagcaaagtcaagtcaaaacatataggattgaacatgacattcccaatatatacaaggccaagaaaggaagaaacgttcttgcttaatttgtgtctttttatgatggttaccaaagacaattcgaatgaggatttggtcagatgacacaaatttataggcacagatggtaagaatttttctggccatctgtattttttatttaaagatggcatatagtttccaaaagacacagtcggtccatctatttactgaatatatttttttagaaatgcctgaatggttaaagaagatgctgtggaataccatttgcaagtgtttcatcacagccttggagcctgatgtccactttatggggctgagaagcaagcacgtggttgctagggaggatttccccgagggtgatgtcacgagagatcaccttccccactctagaaattatactaaaatgcacaaagggaggcaaaaatccaaaaaccactgtctaaaatccttcttctctgaagatacacaacttccctagtttttgaaatgaatggaagtttccaagtgaccctgtaggtagcagaaggcactacaaaagaacaaccgcttgcattttgtgtgttcaggctcatgccttctcacgtgagaaagacatgccaacacacacaaatcacatgtgcacacccaaaagttggaaatgggtccttccctcaccactccaccttctactgatctgttcactcgttcaacaaatccttcctgagaccccacagcgagggctggggaaatgcgtgttctggcccaagggaatgtccagggggaggccccagttggaagagacctgagctacatgggtcccctgggggcagggggaatgggaggagacaagttcaaggagggacagagagagaaagaggtcccatctggtagggacttgctggccgtggtgttgttacaaacacaatgggtactagaaagaggataaaaatccacagaattatgcatgaagcatattttattggcaatttccatcatgaccatttgacctgaatactgccgacacaacgtagtgcattttcattcaaattcaacatttatttagcgtcagctatatcacaggtgcagtattaagagttacaatacaaagaagggaaggcaatgagatcctttgactctactgggagacgaaagcaggatggtccaagaacacgcccatgtcagaagagagagaaagccatatttttgagcattcaggtcacatttaagcctctgccacatttaaccatgtgtcttgcagaactcaccgaagatgaaaccttctccataagctactgagtgtcctaactctccctccctcagtattttatttgttcctagtctaataaggaggagaatgccatcttcttatgtttggtcactgacagctttcaagcccctctctccccctcttcttgtccttcctctgcaccagctgataagaaagtctggatagttcttctttgcttctggtaaataaactgtcaccacgcaaatccctggcccttgcacagccgccactcagccctgctccctgtcactgtaagagccaagcccactcactctgctttactgaagccaccttgatgagttgagcctgtcttgatttgcccagagggtccagtcacataagtcataaacctcttcctgccttctcggccagtgtcatcttcagtctcggcaaccaaaccccatgaaacatcacggtgctaacactctctaccagtgctctgccattactaggtgattggctcgtctctccaacctgcctctaaattcctacaattagattcaccatgccacgaacacctcacacagctagggtcacaggtttacccaggacagcaaagcactggggttcagacacagactctagggtggcgtgaccgtcactgaaccccgacatctccagttcctggtttgtgatcctaagccttttcctctacctcgctatgagttagtttttccatctgtaaaactgagattaaagtattataaaaataaagtgacttaatagttgcaaattgctgttcaagaattcctagcccctagaagggctacataaatgcttgcaaaattaaacaaagcataattcaataaagacttctatacacatctgtaaaatccaaagagtcaccaaacaaacctttgcagacaggtttgctcggattccacctgccgtctttggtacagcgaatagtggcggatgtgactgcttccatgacatagcctgggttacactgatagctcacagtcttgttgaaggtgaagtcggtcccaaactggatgccatttgctagtgtgcctggatccccacaacttataactaataaacagggaacaggaaagaatcagagaaattcatttaccatgaaatgaattagtcaccatttctattcaagatactctctctgagttgctattcacagtggttaagcagtgaattaatacagcaatactaccctctgtgtgatgatttcactgacccgctgtcagaaggaacacttgtattttgagaatcactgatttctgttccgttggcagctggctgtcagatgctgacttccaccccttgactagcccctaattaggcatggggtataatcagaaagatgaagcctgcagccagagaaccaaagacatttcttctttctctgcagacccagtggtctacagacaaagtctggacttttttggtctcaattttacaatgtttgactgaactggccttttaaagtagcttcagccatacgaataagcaactggaaaaaaaatcttaaagtacttaagaaatacagccacaatgtcacacatagttttcccttttttcctctatgaattaaaaataaaaaaacagtataacaccttaaagtcattttttttcccaatggagtgaatttcatagtaacgtctgagtctaccatgatgtctgcttactaacttgtgcagtcgggagcagtgcctgtccaggtcccattggctgtgcaatgccgtgtcatgagccctgaggtcttgtagccttcccagcaggcatagatgaccgagctggagaacagaatgccatcactactgacaatcattccgttggtgggtgtgccagggttgccacaggacacggctgttaggcaaacaagaacaccaccacacacagtgagtgacccagcatgaaaatggcaaacacaagagaccaatgggtatcagtgcaatagactacacatttattacaaacccaaagcacacaatcctatggaagttccttaacatatggcttactatggctcatatgtttattttactgattagctacaaatataaaaataacctttcaattcgtcttttctaaagtgaactatttctaaacaaattaaaacatgagttaaagcactaaaagttcaaggccctgttattcagggactgaatgtttttaatagccttgctatttggggattgaatgtttttaatgccgtgacagaattgttgtgatttttaaaaaagaatatctatgatattagcaacactgaagcatcttcctttatgtaatcactgtatttttttaaaatctaggcaattcaggtcctattttacatctccaggagaattcactttggaaaataaagaatgcctcagaagtatgaatgactgtacttgaactgctttgtaaaatggtgtcctcaataattaccagctctaatagcagctgtgttaattggctttgacatgattgaactttacatttctctcaaaaggctcctaatgccatgtacaggcaataaggcctcaattaacgatggtcagtgcaacaggtctacactctgtgcctattttttacgctctttagtcagtaaacaaaagcaagctcggctgccgctgggtacgtttcagggtgaacatttcaatctacacttttttttttcccttttttagtcgagcctatttaccagaaagattgctacattttctccttagtactgttgcaataatatacaataggcaggtaaataaaggaagtgacccttggctggttaacaagaatatatatcatgagactgcctctgagctgatcaaaatatttaaaaatacttttgcacatttaattgaaacaatttcaaatctggcctggagaacaaagatatatttttcttaaaagaacatggaagaaaacatcctgcaaaatttgctcagcacagagaagtcactgtactgggagtcgagggactacccttctgattacatagaaataaagcacttgtgctcaggttgaactggatcttgtttgaaaaaaataatacaaagtgcacacgctggtgcttcctggtcccgtgccaatggcagacagaagtactcaatcacagccctcttctctgatggttcacggtgtgacttccaaccccttctaacacagacctattagtagtttcctggttggcatatgagttgggatgtatttaccaatccagaagcacatactatttaaggctctctaaaacttgaaagttttatgataactatactatatatcaaaatttcattttgcaataattaagggttggactatccaagacaactattcattcaacaaacacatattcctcacttactgtgcaacaggtactgtgtggatgggctaatggaaagcctgtcacagaaagggagtgagtttggtccaattcatagtttaacaaaccgaaagaggacactgatgttattgttacattgtattctaattacatttgctattcaattgtatgtctaaatcttcaaaagccacctaggtagaaccaatacttaaacaagtcaaataaccgatgaaaaatttcaattcagtttgtaaggaaactaaaatgttagtttgctaatattgttaatgaatgagtaccagcataatgctatcctaatattgggaatgtcccctcaaatattgtactgtggaaagtaaaattcatgattagtttttttctctttttttggctgacaaaaaccactttcactcacggttataactatgaaaatgactagaaggcaatgtcaacatatccgcttttctatcaatgcaattatgtaaaattataagacaggactaagactaaaacaaaacaatagattaaatttagaggagaaaaaagaacaataaattagaagaggaaaagtaaactggaagaagaaaaataaattaacctgtaagtttaaactttgccatattttctctttcctgagtttattttcttttgaaatatgcttttataaaaagtacattttgttaacgtgacttcttcagctaaaacataatttctttaactcagcatataataaaatattatgcttattttaaatatactttattatttacaaatattagtactgttcattttgcatgctacatgacaaaaattgctgttaaattgagttaaatagatgtgaatatctgctcatgcaagttaaataaacctgagcaatcaatttaaattccttagatatagtgcctttaaccataaaatgagtattataaaaatacttattcccggctgttaccaaattacccacgctatatgtaaaatgcctagtgtgagatctgatgtattagtggtagcaatgagttagcttgtagcttatgctattgttattttcatcatcatcactcttacttattgagtaaagtgtagctttatcataatttcatctgaaagagaattaagagttccctaatacagctgaaactaaatattttagttatgtaatgcaacttcatgagatagatccatttgaaatcttaagcttgagcctatgattaaaagactagatggctaacaaaagcaaatttgatttaatgtgaaggaaatatatctgcaatataaattctttgagttgaagaatttaaaaagatttttcgtttagaattataatttcctcctcctttttataatttattcaatttaccatcagtatctaactttttgacagatttagaggaaataatttcatcaggtttgcaataatcttaactaggggattagtcaagtcatagctagtcatagaagctacgcttcctggaaatgcaaccactggttacatcctttttcatcgagaggaactcacacttcagtgatttggacctatgataacaaacaaggaacaaaatgaaaacctacagattctccaaaatgtatttcaaatttttgctggtgtgtgtgtgttcagtcactgattttatgacttttatacataatttgttgccttattgggtgtaacatatattgcagtgggcttattcagcttcccatgatgtccgtatcatataatgcagttttagaagtaatcaattttgtgaggcatgatatatttgagaaatattttcagcattgcaacatttttgtaacttattttgtgtatgcagcttttaagggctaagtttctaattttttttcatagaaaacttttaaatgtctaactttagaaagcaaaataaaatttttaaaaatactttgcattgcctgagttagatagattgggaagtgaaacgcaattaagctctcattcaaataaattgtttaatgtgtactttgctggactagaactcatagtgtgccttcatagccccacagaggtgagattgctaaggaaaaacattgcccaccctcaactgttataattttgttcatcttttaagttttcaaaactgaaatacttgaggtaaacatgatactgaatgtacagtctcaagtgaatggccatctttgatagaatatttcatattccactttctgggagtgtcagagtctctgctcttcatacaccaagttcaggctgcaaaccagggtttaggctcaattattgcatttaatattcttgaaaacagaaggatagttctgcttttaatcagcatcagattatatctataaagtctgaataattattccagcattcacttattgacatccagccctctttgtaactattgaggaaatattttaaatttcaattaaaatactgccgatgagtgatctttcagcctctctgtttttaaacaatggagaattaagatccagaaccaagactttgtgatcactacatagaatcaggtctagagccaaaatgtcacaattcacaaacccaccatggtgctttccaaaagtcccgaatgataaatgctacagatacattaagctactgttaaatgggatttgacagaaacgttgaaattttactatggaaattgttttaatttattggcaacattttttgtaactccacactttgttataactacaggattaaacaaacttcacaaaaagattataagccattcttacacaccctttagtcagattcatccactgtttacattttgctcactttttctccctctgtctctctaaatatgtattttctaaggtatgtgagtgtaagttacagacatgacaactctttagagttaaatatatcagtatgtatttcctaagaacaaaggcattctcttacataaccataatacaattattaaaagaatgaaatgtaactttgatgcaatgttgtctcatacacacccataatctaattcacttcaagctcttggacatatttttaatagttgtcttaagatcctgtgtcagttcgccacctagatcatctcagggtcagactctaccatctcggtaacgcctctcataactctcttttgctcagtgtaggacccaatccgagaccacacattgcacttatcgggtctcttaaatctgaaagaatcactcagacggtgtcttttctgaacttgacgtttcttcgtgaacacgggcaagctgatttgctgcatgcccctagggttttgggggatgttattgctgctgcttcaggactcgattcaggttacgcatttcactggcaataccatagaaatgacaatgtctcttttcagtgcctcatatcgggaagatagaacatcaccttgttaaaatattggtgataatggtttatcccataggattgcttacctgaagtactatatgaaagagtagaaaacactctggttttggtgagaaaacattgctctcatgtgcaaattttaatactgaaatatctacaagatgagagggaactgaaaacatttgcatttgattaacaaatttatatcaatttatagtgtcatacttcagttaaaaacaaaagtatgatcctgcaattcgtgactatgggtaaccatttctcactactaatcagtggtatttgacctaagacaacttttttagggcctagtcttaagatttatactactttgattgtcaagaggcaattcagagtaaaaaattatcttggattatcatgtttgtgtgcacatatgtgtatgcctatattatatgcatatatatacatatatagtcaaaaatagtctttgagaaaaaatatatacactatgcatgggtaaatataatatataaatatgcaaatatatgcacaaacattcctatattaatatttagcgttattttatatgtgaaattaatgttacatagattatataatatagatagatcatatacatacattatttctatttacctatatagaatgtataatacaataaaggcagaagtggagacagtatagtcaaggacaataaatgaagattaaggaaactcaagttaaatttctcacattgatagtgtgtatgtgagcttactcaagttggtaaaattatttggttggaaagtgtttcatacatacaacaatacatattgaattaatttgtataacctttttagactgaaaatttaattgaggagtttgcttgtaaagaattcctaacatttacattcctatctgtctgaattctaaatcgggttttgaactccgaatacatggttaccatcacctctcagttcacctttgcttgaggctacatttctgatacacagtgcagtgtctataaggtgtccgtggctattcttactgtcattactggagcataccaccacttcctacgatgcctctcaaacattagaatcaagtagacccactccaaaatagttcatagaatataaccccagattcctgtgaaatagagtgctccacacacaggggccaccaacagattggaaatgacgtgtgaaggaagcctgcttccagcctgcggaaattcccatcagtgatctgcattggtcctgctcactgctctggaaccccactcactcactgccaggatctagaaaacactggcaacaccacatatagattatcactgggagaagattagaagcttccgtgttacgaactttcaaacaataagcatccgtgtgatgggacctgtggatacttggaatacctccatgcacccagtcatgatttctgatgatgcttccacaaatattgcggggaaaagatttaattgtataaatagtacaaacctctagaatttttgtagaattttgccaggcattttagaacgagctgtgtggttttaactttcaaggtggaccttaaggcttctggctactcaccctcacacaccggctgcagtcctgaccatgacccattgagcaaacacgtgcgttcaggggagcccctcagctggtgccccatttcacaggagaagcggagaagactctttgtcttaaagtcatcaccaagccgagacccatgtgctggggtccccggatcaccacagaatccaggattatttcctattgaaaacaaacacatacggcaatccacaattgtgttagacttgttttaagcagagttgtcacacttaaagataatgaaaagttgttgaaatttgtgtttcacatgagttatggttacacaacattctgcaatcttgtaagaaagaatttctttgtgatagccccaaaatgaaaagaatttaggatgtggctcccatgttactaacttcacaatagcctattcaaatatggttgtgagaataaacgacgtttcctttggaaggaggaaaatgccaggaatggtaaatgcatcacgtcttcactgaaaaggtaggtagagagcaaaaggaaaatggggctttaggtaaacagggaatgtggggaaaaaaaaaaaaaaagtcaaaggagaggtttagctcttcagaattgtgtccagagttgctggttcgctgaattttggttgtttaagaaacattcgtgaaaaaaataaagataatgttttttttcttccaaagaggacccatgcggttaatggtggtagaggatgatggtagaggatgatggtagaggatgatggtagaggatggtggtagaggatgatggtagaggatgatggtagaggatggtggtagaggatggtggtagaggatggtggtagaggatgatggtagaggatgatggtagaggatggtggtagaggatggtggtagaggatgatggtagaggatgatggtagaggatgatggtagaggatggtggtagaggatggtggtagaggatggtggtagaggatgatggtagaggatgatggtagaggatgatggtagaggatgatggtagagggagggaaaattaaccacataaaaaagaataaagagcgaacagggacacacggagccatggccggcaagcgtcctctcaaatgagatccagactctcctgagaaccccggaggagaacatttaaagtaatggtgtctaacgattattgcgaagatgaagacaatatctataagagcggcgtatttggctagaaatgcaatactaatttcaaataaatgcataattatagggcttttcaaataactgtaaatcatcattatttgaaatcactatttgaaaagttatttgaaatctgtaattctgtcagttcactcgtaagcccctcacctgtgcagtggggcagtgccccgctccagtgactgtcttcctggcacactctcgtgtcgttgcctatgaggctctcgctccctctgcaggagtagtgcacgacggcgccataggtaaacagctctccagtgaggacggcgttggcagggacccctgggtgtccacacgatatagcttcagaaaaaagataaaacaattgagtacatccttccagttaaaccactttgtattggaaaatctcccatacagacacccatactgacatcatgtattaaagaaaaacacctaaatattctggtacttatgtaatttgtgagaaataccaattttcagatgacacttcctcccctaatttctttactgaaaaggaaaggtcccgtttatgaagtttttgttttgctaaggtagctttccttatggtagaaatttacatgtggattttcaaggagacagccatactgcctacatttttccatcgacccttaactatattccaaatgaacagtattataggaaatttgcgaaagtaacatggatgcattaaaactatttccacgatgttttcagttaatatgacaatcatattctttgcttgcggacatgattctgtcaaatctgcttaatcttcaagctcacatgtctaagaaaaccattctaacagttactctttgaataaggggcagtctaatatgtataagtaaaataataataatcaattattgattcatttgttcttcaaattgttctataaaataatctcattatttcccttcatttccttaaaattataccaaatcaggcctaaactctatttataaatatccttcaaaaaggcaaactctgtaatccagattaaaataggatagtgaagatttatttttcctttactgtacagtatcaaatgagggctagcaatggacaaatttttatctatatgcaaaaataaccgatttgagactaccaaggaattactcaaaggcgactgctttagtatcctagagtaattccatttggtaacgagacacccagaagggttatcaaccagagaggtagatttgaacgcctggaagccatggccatcccctgagtcatatcagccgtcactttctgtcttacatggacattgattcattggagaaccggattttatccacatagagtccttaaaagaagccagtgagacctgaaacagtgaaatgctggataaatgaccatttccaggtgaaataaaatttatatcttatttaaattttaaccttcagtgaaacaatatcacagcaaaatcagacatggagctcagctgctctagagcatggaaaagcaaaggcaccctgagatctttggattcccaaagtgacgacaattccaactgttaatgacaccaagcggagtgaactggccaccccggaaaaggagagccagctaaaccccagctcctggagacttgaggaacatcagcatcagtacaaaaccaaatggaagtctcacacaagccagtggagacataaaagaaatgttctgggacagacaaaaacaaaactaaaccaatttctatgaaaaattcccatgtgtgaaagcaaggaagatgagaatgcagacataatttgaagaccgtaacacatttacagatgcattttttgttaaataaggctgagaatttttttgaaagttaccactgtcgttctccacaggaattaattgaattgttgaagttagaatttgagatgagtttctgtgtagattagaggaatgtgagggaaactcacttggagaaaaaaaaaaaaactgcaacactaacccattctcaaaatacacttcacagtgctaaaactgaaaaggcaagaggcattatcccttttattgtgtatgtggtagatccgattcataatgtaagtgccatttccctcctcatttctatttttatttttttagagatggggatttgtttgctggccagcctggagtgcagtggtgcaatcgtaactcctggactcaagtgatcctgccacctcagcctcccaatgtgctgggactataggcatgtgccaccatgccccactagtttttattttattttttgtagagatggagtctggctaggttgtccaagttgatctagaactcctggcctcaagagatccaccttccctggcctcccaaaatgctgggattacaggtgtgagtcacggcacctggcctccactttctttatggatgtaaaatgcataggacaaagatcagattttgattttaaggattgctttgcttctgcctaatttcaaaaagactaaagagagtaacaccttttcctaaatcttcagactatgatcttaagacatgattctcttttagttaacagtcaatctgatttttttttcaagtcaaagaaaataacactttggctatttgggtaaaatgatatattcttgctaatcttcatggtctaaaatacactgacaataaagctgtaagaggggccataaggatcatctataattatctctgcccagaagaacacatccatttttcagagccatatcccttcccctgatttaaagattcaattcacaagccaattactatcaggatatgaggtttttttaaaaaaaaaaagaaagaaagaaaaaaagatttaataacaactttattcatttattttttatctttatttaagttctgggatgcatgtgcagggtgtgtaggtttgttacgcagggaaatgtgtgccatggtggtttgctgcacctatcaatccatcacctaggtaccaagccccatatgcattagctatttatcctgatgctctccctccccctaccctactgacaggcctcagtgagtgttggtcctctccctgtgtctatgtgttcagctcctacttataagtgagaatttgtggtgtttggttttctgttcctgcattagtttgcagaggataatggcttccaagctccatccatgtctctgcaaaggacataatctcattcttttttatggctgcatcacgttccacggtgtgtatgtaccacgttttctttattcagtgttttactgatgggcacttgggttgattccatgtgtggttattgtgaatagtgctgcagtgaacatacacatgcatgtatcatgggatctaactaaacaaaagagctttagcactgcaaaagaaactatcctcagagtgaacacacaaccaacagaatggatgaaaatcgttgcaatctatccatctgacaaaggtctaatatccagaatctacaaggaacttaaacaaatttacaagaaaaaaacaaccccattaaaaagtgggcaaaggacatgaacagacacttctcaaaagaagacatttatgtggccaataaacatatgaaaaaagctcaacatcactgatcataagggaaatgcaaatcaaaactacaatgagataccatctcatgcctgtcagaatggcaattattaaaaagtcaagaaacaacagatgctggcgaggctgtggagaaataggaatgattttacactgttggtggaatgtaaattagttgaatcattttggaagacagtgtagcgattcctcaaagacctagaataagaaataccatttgacccagcaatcccactactgggtatatactcaaaggatatgaggtttttattgtagtcaccatggactgtaccaggaatgctcacaaaacccaatcaggtctcacagcactcccttctttggccgtagatgccaggtcaacagacagaaactccacaccagagcacttcgcccacctgggctgagcgagagtaagacgcctggcggggaggtcctggctgccgtgtctgagctgtgtggaccaggcctacctggtaggctgaggctgaaggcaagccatgagaaaaacagataaaggcatcattgtccaagtggcatccaataacctgggtcatttctcctgagcataccagcatcccccgacccttcaaatttgctgaagttgtatttggtgatttctggccactcgatctacagctatcataaaaactcctacaattggtgatgggaggacagaaggaattaaaattcagtgccttttaaatatacttacggaattttctgctgatggtgaccttgcaggggtctctgcacagaaattgggaataaccctgacttacccaaacacttgggcagggatcggtcccataagccatttgccatacaggtcaaggctgaagatcccagcaagtaaaatcccttcttgcaatggtacaggatactcattccatactcaaaactctcagggaagttctgttgcccgtgacgaatggcattttccacaaagcctggatcagaacagttcaccactagaaaataaaacatttcacacaccatttagaaacagctagaaataacaacaaaatagatcagaaatgaaggcgaattcctcatcattttagaaagttcaaaaactgacaacatgatggctgaggctcatgaaattccactctcacgatgaattctccgctttggaccactctttttcaagaggtgtcaagaactggtcgaccacgatagcaattttcacgtgaggctaatttcctctatttcctagtaatgtttattcaacgtaaattctgaagttagtttccttggttaagtttttgtgttctaataatggtcaaatagaactagctgaggttcgtttaaatatttttactcaagtgtggtgttttagaacagtctgtggcacaccagttaattaccccccaacacacatacacacctacttgcattagtgctttaatatgtgtgcctaaaataattttgctctatgtagaacgcaactaaaaatgacaattattccatcaacacctaacagaaatgcaaatcaagccagcctctgacttaggcctcttctccttttagaaacaggtccgtggtgaggcagtcttctgcggcatgcgggacatgctgtggttcctctgaaaggcattagcctgaatgcctgttggcgtctgtgagggaattagcgatgtgcttttgcaggtgcagaggaaaagaaagaactctgattacctcatgctttgacccaccccaccagtgaatgaggcagctgttccagaggccacagtctctccagatatttctggctcagaaaagcactgtgcaaatgaatctcgggcggcctctgcacatcatgagtcccagaagctgaagacaaaccctgtacccaaactgtgcgttttatttcttctctattcaaaaaaggaaggcagagggcagaatcaaggcttacagtgttcccttttagtgcagtagaataatgttctatgcttcctaaaacacccctgagtttacagaagaaagtcttgagttcttttgaatcaaaaaagccaaaacaaacaaaaagccatgtgtgaagttcgggcaaataatttttaaggcatgtacatgcccctacagggcatgtatctgcaatacaattgtaaccaaatctctgaaatagcaggaattacctaatgtgagaaattctaattaacttgaaaatgtgattatttgtataacctggaagacacccacatcgtcccattcttacatcaagcataagagatggaatcagctcccccatgccatactttcataaggagacggacagtcccgggctggaacactaaagatatttttgtgtttatgtttgtgcttatgttgctcttaggagactgtccaaaaataatttcaaactgtgtttgtaatcaaagcagagaaagccacttaggagaaatgagtggaagactttgaccatctcccactaaggatgaccgagagaaaccaaatggccccgggatgccaaaggccagattgagctgatgccaccatttctcctcctcctcctcctcctcctcctccatttcctcctccacctctgtgtcctttcttcctcctcctcttccttcttctcctcctccacctccttgtcctctcctcctccttttcttcctcctcctcctcttcttccatccctctcttccttctctttctcctcctccttctctttctcctcctccttatcattttcatcttctctttggcccagcctctcttaaaggttcactggcagacatttatttactggtgcagtaacaacaggatccagtcacacccttctccttgcaggcagagaaccaaatgttctctgagttccaccacggctggtgaaggggaatttacaatatgtgaggttcataaccttgctctgaaactaaggactaaaattctctttaagggtcactcttgccgtggaaagaggtgcgcaggagacaataaacccctcattcttgtaaatcattttgcaaccttacattgcattagaattgcttggaggatgtgtattaaaatgctaagccctaagttcctaccctttcctttacctagttcactacccttaaaatattttgagcagtaaaaaatgtttgaaagcaataaatattccttgagccccatgtggggaaactcagtggatcctaaaatggaagaagcatggatacaaatactctaaatcttctcatgcaccttttcagtcctacatagagttgcagtcagaagtctttctttatgttccttcctatttaattctgaggctccaataggagatacagctgcaactatgtgctggaggaaaaacagggcaggaataatttgatttatttgtccatgatagaacttccataccattgttgcaaatgggtgtgttttactgtacagagaagaatttatctgccagaagagtttgttagtgaccaaccaatccacacaagcacctttcccatctgtatttgttttgtcattttctatgtgaacaattcctatccagggatctgatggaaagaggcttatgtgagtgacaggtgagctattggtttgtaaactagaaggagaaatggccagtgaagttcatggtgcggagatatgtcaggcccacctgcagcgactccagacctggttcatgacatgctgttaagtatagggtaatgcgtcagaaagaaataaagaggctcactctagacggctgcacctcatcttaacatcttaatgcctaatacactaagacttgatttccaagtgtgaaaacctgacatggaacctgattttgtcagctgggaggaatgagaacactgatgtcttatatacatacagctcagcgtggattttgtcagctggaaggaatgagaacatgatgtcttatatacattcagcccagcagggagaagttcaaatgaacacacaggctgtgttctgtggcgaaagctgggtatgtggaaaggtaaaagaagaaattaataccgggatcaataacaggtccaaagtcacaatgacaattgaactagaaatacataagaatcaggactcctgaacacatgtctggtatagcataataataaaaggcatcagcattccttggtgacaggaatcccagttgcaccccacccctttttcctggagaggaccagctggaaatcttagccctcgataggattctagaggtgactcattaagctattttctctactctatatacactccttactcagagatgtcttcttaaagatgctcaagttgacatacgaatatgggtaacaggccaggtgcggtggctcacacctgtaatcccagcactttgggaggccaaggtgggcagatcatttgaggtcaagagttcgagaccagcctggccaacacggcgaaaccccatctctattaaaaatacaaaaattagccaggcatggtggcaggggcctgtaattccagctactcaggaggctgaggcaggagaattgcttgaacccaggatgcggaagctgcagtgagccgagatcatgccactgcactgcagcctgggtgacagagcgagactctgtctcaaaaaacaaacaaacaaacgaaaagcaaatatggataaacataaggtcctattgtttattctctttcaaactttcttgaggatcatggaggtccttcctatccagtaatgtccccattctcagttaagtgaacgtactgatcgcctgatgaaggaagcctgaaaacactgtgttttgagatttgatggtgaattatttgagcagttttgccagctctaagagggatcactgttcccgtggcatgcctcacaccgtagtaggtctcagcaaagcacccgcactatgaccgcggctccacctccaggagctgccctgtcctgccatgtgctcactaaccagtgtttcccttttaattcccttcttggggacaggaagcaaggtgtgctccacatcctcgcttctttccagaacccaaagcaatggcagtgttttcctgaaaaactccctaatgacagagaaacgtgataattcccatcccaggttccttctccagctgttgatcaatagaaacgaagccacctgtctgcacgctggtctcttataggcagcttggctctaagctgaagggcagtaacagggcatcacataagagtctggtgtcctctccatggcacagatgctgggctcttcgggcagacgactcctaacataactttgcaggattcgtatctattcgattccagcctgttatgtgatgaggaaacaccgtgaacacttcaactgttttttaattagataatgtaattccaagttccatctgttgttctcagaaaaactttttataatcagttcttatattaaacagaatctatatctgatatatatatacatacatatatatttttttttgagatggagtcttgctctgtctcccatgctggagtgcagtggcacaatctcggctcactgcaagctccacctgctggattcacgccattctcctgcctcagcctcccgagtagctggtactacaggcacccgccaccatgcctggctaattttttgtatttttagtagagacagagtttcactgtattagccaggatggtctctatctcctgacctcgtgatccgcctgcctcagcctcccaaagtgccgggattgcaggtgtgagccacctcgcccagtctttctgttgtatatttttaacttcatttatttattcattaaaatgtattacttaacgataattatagataaggctttacttgaaggctctgagatgattagagcagaaccgtggactttcacttgtatatccaaaatttggcaaaaaattgtaaatctaatcgtaacccaaagtaaagcacttcccagtctttggcatcagcactctttcctacaagcacaatagtttttaaagaaagtataagcaactatgatcgaggtcgtgcctaacttcttatttttgtagaagctctgcctggggccaaatttgttcttatgtgtgttgattttgaaaggcaaaccatggaaataaagcttagtttttaaatttcaatataattattatacaaaaaggaaaagtaaaatcgaaactgtcagattaaactttaaaagctaaatgctatgggctaagcttttatgtgaaattaaaaattaatattaagcaaaattggcagaaatacactgttacagtatgaactggtaactcctgttccctgagcaaatagaaaactgttaattactaagaaaaaaaataaaaccaacttagtgcaagttctgtttttaaatggctgtgagtgacattctgagaataaaaggcaactaactttccatacatttggaggtgcactgagagaccatccgtttatgtcgctgcctcaaatcggattcacaggaaacgtctgatccacgtctgtcaaattctgctcactggggcaaccctcaacagcagtgactgggagccgagcaaacgcacaggagggagaggtaggatgctgggaggagcatgggatttaaagaaacctgtgcgttgaggctatttatttactttttcttttttcccccgagaccacgtcttgctctgttgcccaggctggagtgcagtggcattatcttggctcactgcaacctccgcctccctggttcaagagattctcctgtctcagcctcctgaatagctgtgattacaggcatccgccaccatgctcggctaatttttgtatttttagtacagacagggtttcaccatattggtcaggctggtcttgaactcctgacctcgtgatccacccaccttgggctcccaaagtgctgggattacaggcatgagccaccgcgcctcgcctcattcttttacttcatgagtgctggatgaacggccagcgaagatgagcaaatagaagttgtcagagacacatagtggtaattttgggtctaggaagtcaggaatcccaacaagcccagcatcccgtgcaaagcacatgggtttggaggtaataaacttttcaatcgtccataccaccatcgacttcagattctgttggtgttttttaactcacacatatttatgcacgtatttaatccaacacgtttgactacacatcacctggacaagaggtttacatacccaacttaaaaaatacattgaaaatgttttaaagtataacttctttaagtttgaattttaagttaacagttaactctgaacagatactggaacaaatcagacctgagcttaaaattttggcagaaaaaccattattttaagaccatcattggcctcaaagcgactcaaaatcaatatacgtcccaatataaactgtgacacaatttttatgtcacaaaaattgtgtacagaatatagaaaccttaattctgtaagcagactggaaatataccatgttcaaagctttattttgttttcaaaaagaatcctgtggccccatcatgcctgtatcactagcttctgcctagttcaggaacacgcaaaacacatgatatttccacatgtaagtgagggaggagactgtggtgtgatactgctacactgtttcaccacgtgaggcaggagactgtggtgtgatactgctacactgcttcaccacgtgagggaggagactggtgtgatactgctacactgtttcaccacgtgagggaggagactggtgtgatactgctacactgtttcaccactttccttacaaaggttctatacaaagtcactaaattacacaatgcataggcaatatataggcaatactccttatagttttcttctgaaattttacttttcttaaaaaaaatattcaatgaagtataactgataaagtttaaagggcactgttcaaacaaacattgtcaactgattgacatacaaggaagaaagtcataggagagggtgactcagcttcactcaaggagctcagtgggaaatcaggcaaggccttaagaagttgctttgtcttaacaatagctgcccggagcaacaggtggacgggtctggtactttcaatttattctacaaggaaaccggaaatgtgctccaggaggccccagtggcttctgaactgctccttctacattctttgcatattgtgatcgaaaagaaagaagggaagggaaggggaggggagggaagggaaggggaaggggaaggggaaggggaaggggaagggaaaggggaagggaaaggggaagcggaaggggagagagggagggagggagaaaaccgtctccatagaagaaggaaggaaggaaggaaggaaagaagggagggagggactgataaccaggttacagctatagttttggcttttaggtgtgataaaagaaatacgttataatttattgtaattgacaattgtaattgattgcctgactttcctgcgataatataaactttgaagaggaaattcagattccctgaggactcactgtctgccaggcacttggccaagcattggtttatctagagctctcaaaaacctatgaagagggtactgtggctaccacttccttgattcttcatctaagaaaactgctgttctcccaggaagtcgagcatgaactgtaagacctgcagctaggactaggtggtgtgggtgcaaacacatatcagatcaacccctaagactgtgttttctctactcagcaacactccctctaaggcctacacagatattaatattttccccagttcatttattttttattttttttgagacagagtctcactctggctcacccaggctggagtgcaatggcgcgatctcagctcactgcaagctacacctcccgggttcacaccattctcctgcctcagtctcccgagtaggtgggactacaggtgcccaccaccacgcccagctaattttttgtatttttagtagagacgggttttcactctgttagccaggatggttttgatctcctgacctcgtgattcgcctgcctcagcctcccaaagtgctgggattacaggcgtgagccaccgcgcccggctctctagttcattttttaccaaagaaaatatgcctaatgcaaaggaaaaacattgcaggaaatattaatttggtgcaaaagtaattgcggtttttactacagcaatagcaaaaaccgcaattacttttgcatcgacctaataacacaaggaagtggcatatgcaaattctctacaccatcatatttacatcttgacttcagagactcttgcaagtacattccctcttaactgattttaactcagccctaaggcaaagttacaactaattcttaatggtctctccgactatattatttccaggctttggatgtatttttctatcatattttactgataaaataataaacagcttatattaagggcatttagcatttgcaggtcaagaagaaaggcaagttaactctctgagctattaaaattttaattaaagaggcattaattttataaggataattcttgacatgaaaaattcttcatgatatatgattacacaaaaaggcaggttataaaagagtccataggaattatatgtaagcttatgtgtgtatacatcatatatataaataagaaatatataagtatataagaaacagaaatatttctttctatataatatatacataaatatatataagaaatatataaagaagtatatttctatatatataagaaatacataaaatgcaataaaatctacaataccttttctaaaaatcaaagcttattcactactattttgaaagatgattgatacagtacttctcttcggatataactcacaatttttgctgtaaggaatgtacactgcattatgagaaatgaacacatgacttttaagttaacataaaatcggaggatgaatgcccccataagaggggccttccctaagcacaagagtgatgcgggttcatcaccgtttccctctgtgccaggggacacaccctgccagcggcgcgcataagggcagcttcggggagactggagtctcagggtccctgggctcacaccaacctcctgctcttgacaagctccttcccatccacttccttaagcccaagaggagctttgttaagtcacatcactgcaattggttcatttaagttctgccatacatgtgcaggatgtgcaggtttgttccataggtaaatgtgtaccatgggggttggctgcacctgtgaacccatcacctaggtattaagccccgcatgcgttagctatttttcctaaaacctattttccccagttattaaaataactattttagctattttaacattagcttacatttcctttaattttaaaattttactattttaacattttgagaatatgttattatatcccatttttcattaacactttagtacaactaaacccataatgattctttagtgaagtttttgtggttgtttcctttttgattcctctaccctaacagaacattcactaaccccatattttcttaattttctttatgcttatgtacataagcatatctggacacatgttttacatgtgtctaaacacccaatcctataaaattatgaaagaaaagaaaaaacaatatcttaatgtttgcatgcaatacacaaattattagacaaagcagggaaacagtatgtgaatcatcctgaaacgatgtgagacctggtaaatctaactggtccctcactgaactggctcaactcttaggcatagtgacacatagtttagaataggggacaaagtttccaagaaagctcctctagggaaatatgggcctccaggagagtaggaaaatgtgattctcaaaataaacctgaagatgcttgttttcattccttcttatgacatcttcaactgtataaattatttcatccagaaagatactactactaataaaagggataccttcttttatttattttttaatcttatatgcaaagatagtgttactgggttgagtataatgaattttctttagtctcctaaatctgagttttctaattgatcacaagcactgcagggctggatagagctgcatcctgtgaagggttgaacctgagaataagcaggctacccagggtgaggtggatgttgtagaaatctgtgtctaattccgcctcacagtagcacggatttacctggggctctgtttcaaaatgtgggatggggtctctgttttgtgccattaactaagtgctgcaccagggtcacactcaatgagtcctccagattacacacttgagaatcttaggaagtagttaggaaaagaatgcaaagacaacagcacatttatgtgagatacaacagcctacaactcttgtgagaatattttaaaaagcacacacagtaagaatcagaccatattgcagtaaacagcaagaatccctggcaattttgttcagctgcttttttttaacttgaggtttttgagttttatgccattgtttcctgaagcttcaccatctttatgagtctgtcctctttgaaatattgttttttcctgttttaataacatgcatataaattctgtgtactagattgaatcttagttctgaaataaaacaaaacaaaacaaaacaaaatggaataatagaaaactaaagcaggcagacagctagggatgatccaggcacttctaatcaacatgacatgccaatgatggtccattaacctcctcctccatcccctgcttcatcagatatatttgaaaaagcagtttttaaaattaagtttgtttctatttttctaggaaaaggcaagaagtttaaaaaacaaaggctacattaatcctgaagagtttaaaatgcatcaacgaatttgtttaagctgtgcaacagacatggtatctagtggaccagagacagtatctgggatacagagaatgatgaataaatatgaggtgtttttaatttcttcttctcttccttgggataaattagaagaaagtggaacctacatacaaaaaaagcttttcatacttaaaagcccactcttttgagttcagttaatctctcattctgcaagaacaagttttgtgtccaatgcacagatgccacggcagattgggtgagtcttcctagctagcaaactcctctggtcgtctgcatagttatctacttaaagacacgaataattgtattgatggtgtctagcacatcatttgggatatagtaggtgctcaacaaatgtggcattgcatggcctagaaggctctagggggatggatacagaatgttctgatacacctaagacgtgaagacataattatgctgtccccctgtgtggaggtaactgggacaacatttgtggacattcattctcaatggttccttcagtcatgcaatttattttctgtcacacaaggaagagaaaagagtttgattaaagctgttgaatctttccttaagtccttgcagctgcatgagcaagaggctgacactaatatctgtcttcccatcgccattccggtcctcatagtttcttgtagatgtgcggatttcatgtattcctctgagaactgaatgagttaacgtgattgtttcagccatatttagcacagtgtgcaataaatatttcatgtatagcaaagcctcctggtgctagagacagtgggacaagatttcattcagctccggttgacacatttcagggtatcccctaaacccatcccccattttccatagcccctgactttacaagtgagcctctctctacgaacccattattatataataatcctatatagactatacgatcgacttgctaattttcaagctgaccagaccacccacattatcggcgaaagcaggaggttttgagcaagaaactagggacacctctgtgagcgattccattcctcctccctcctaaataagacacaatagaagcctgctttctggggagagtgagaacaaagtaactttgaggattttgttatgaatgtaagatgctctctaccctggaagagcgagaagcgatgataatccccatgtatttgttcagaagtattcacctacagcacatgggcccagagctatgcaaggtattgagcaaatgagatagtttgaaacttcgcatctgttagctgagcttattggtcagaggcatcatcccagggaagcgcagaactgctctggtctttcttcattcaccgcctttcccacatttcaatgtgatcttttcccttcagttgtagattgctttccatagggtatattagcaataggaattgactgctgctgcagatacaccaattcagataaacttgggctcatatcttttggcagcaaagccttatacaatatacatcatctaaaaggtgattttcttattgtcttgtccttcaacaggccaattatttctagggtgtgtcattaagggtatttattactttatgtagaaactacattaagacactcaatgttcttccacttaaaatcgcaatgctaaaatacttcttaatacacatggcactctgataaatttagagcttttaggttatatacattatttaaatttctgtaacagggtaaggactaaaacacactaaatatacatctacgaatgaaactgtcactgttggagatttttttggcaatgcaatcaatgagttaaatggaaataataaaaagtacaaaagtttatattcatcaaaatgaaaccagaatcattttctaaaaggccagatatggccttatcctaagacttttgaaaaatctcagagaagagaaaacatttctttaaaaaacaacctggaatttgaatttttttaacaacagacgtggttcaaaattgccatttccttatgagcaaacatttttgaaagtaaaacttgttaattaattgattaatgaaacataccctttttaaaaaaaagcaaaaatgcgagtgaatatgagtcactgaagtattcaaacgttgtgaaagtaatagatgttcagaaaagagtattcctgtgtttaaatacataaatagcatttggtctatggctgtatttcccatctgagaactgcagtagtcatggacagtcacagagggaaaatggggctgtttttaataaattccacctattacaaagaagcagtgggtacaaaagtcacaggaaatttcgtttaagaaggtgactacacagcgaaaacctgacgttatttcctactctactgtcaagtacagatgcttaaaaatatgttaaatcagtataaacataacagatttaaatattccatatgagaaacaaccagcttcttaaaattttagtgtgtatgtatagcaattctttcaatatttatcttaattacattcacatgatttaaaagaaacacatgcatgaatagtacatatgcatgcacacacagacacatgcacacacatgaacagacatgcacacacatgaacacacacatgcacacatacatacacacatgcacacacacatgcacacatgccacactcattgctgggaggtagaggagtagggaaatggggactgcttatgggcttagcgttttgttttggggtgatgaaacatctgggaactagacagaggtgatggttgcacaacatggtcatggcgaaagcgcccctgaactgcacactttagaacggttaactaggtcgagttttgatttgctttgttgttgttgctgttttttttttaatgaagtctcgctctgtcagtcaggctggagtgcagtggcgtgatcttggctcactgcaacctctgccttctggattcaagcaattctcctgcctcagccttctgagtagctgggattacaggtgtgcaccaccacacctggctaatttttttgtatttttagtagagaggggggtttcaccatgttggtcaggctggtctcgaactcctgacctcgtgatctgcccgcctcagcctcccaaagtgctgtgactataggcgtgagccaccatgcccagcaaactaggtctagttttatgccatctgattttcttttgagatggggtcttgctctgttgcccaggctggaagtgccgtgtcttggctcactgtagccttgacctcccaggctcaagggatcctcccttctcagcctcctaggtaggtggaactacgggcatgtacctaccatcgcagctggctaatttttgtagagactgagttttactatgctgcccaggctggtctcaaactcctggactcaagtgatctccctgcctcagcctcccaaagtgctgggactaaaagcatgagtcactatgcctggatgaattttatctcaagaataaaataaacactgaaagaaaggattgtccaatatcatgtgttggagcttcatccagtacttgtgaatcccaaagcagattttttttactcattaaaaactgcttccctttatatacacttatgtgaaattttacgtgcgttttaaaactaagaacaatgtataaaggccacttctagttagtgaagtccttttaaattggagacacttttccaaaatttgaagcaacaaatgggtgtggattgcctgtctgggttttctaaatcatcccccttgttgaaggtaaggttatattttcctccttcaatgcatttattgccaatatcctgtaaactgcagcagagggggctactgtctgcccctgtccggcatcactttcctgatcctattacaaaagaggagtgtcagggcactgaggcagaggcaaagcacagcccaactctcagcgtctcccagatgccaactggatctactttaaaaatattttttaggaagtcggcttccaattatttgagaaggatccatctttttttcatcaaaagcaagaataaagctgaattttcattaaaatgaaggaagcactcaaaggtctcccgggacgtatagatctaatcctctagtgtaaaatacaaagggaagctcttggttttgtttctaatgttttaaaagacgagcgtggctaaagttttaggacgtagactgagtgccacaatgaagacagctcccgtctcggcccttatgacttcaatctggcctggagttactcccctgcattgaagaaagcagacaaggctcgtgatgttatcgtcaacggttgttctgaaagtaagaaaacaggctgggtgcaatggctcactcctgtaatcccagcactttggtgaggtcaggaattcaagaccagcctgacccacatggtgaaaccccatccctactaaaaaaaaaaaaaagaaaaaaaattagctggacatattggcacaatcccagctacttgagaggttgaggcaggagattcacttgaaccctggaggcggaagttgcagtgagctgagatggcgccattgcactccagcctgggcaacagagcaaaactccatctcaaaaaaaaaaaaaaaaaaaaaaaaaagcaagaagaagaaagaaagtaagaaggaagaaagaaagtaagaaaacaacattcaaacaaccaaagaagtagcctaagtagttgacctcgtgtgtactgattgctgatggtcaatttgggtcattctacgagacatacaattaaagggaattgatggatgagcattttcagagtaacattgccttgcagtgggtggattctttccccacacacagaagtgtgcacctgctgttgttgctgctgtggtgaggacgcaggtgctgatgtcatgcggacaactcagccggggcagtggaaagttcccaaaatgagcaccagttccccacacgccatcgtgcccactcacgtgataccactgccatgttttacagaggaaaacggatgctttttgactaaaagactaaaacttttatgaaaaacaactcatatgtggtaaatgtagaaattaaagccatcaatgttttatctttatatggaaagtgagtatagctacatagaaacacacagtaaagtttttataggatcaattaattaaaaaatctaattcagaaaattatttatagacatctttatcattcaatttttaatttttttattttgggttagaaacatagaagcccttcctgataatgttcctttgtaatttaataaattaccatattaaaaccaatatctcttgaatatccataggttaaaaaaagaatagtgaaactctatttaaatctcagactttatacaaaaattaacacaaaatggatcacagactttaaaatatatcaaatgcaaagtgatagacaaaatagaggaacacttcaagatctaggtcttggcagagttcttagacttgacatcaataccatgacccagaaaaagaaaagacgatgaatttaaaacttgtgctgctcaaaggaccctgtgaagaggatgaaagtcaaacgagagactgggaaaaattctgcgaatcatatacctgacaaatgactattacacagaataaagaactcttgaaactcagtcttaaaaagcaaacaaaaaaatccaaacaattccattaggatgtgagcaaaaggcatgaacagacatttcactgaagagtacagatgggaataatcaccagataaggtactcacgtcgttagccatcaggaaattgcaagtgaacaccacagaaagctatcaccacacatctatcaagaaagctaaaataagacagagtgaccgcaccgaatgctggacaggatgtagagaaacttcatcgcccacacatgttgggtagggatgacaaatagtaccgccatgctggaaaaatgcttggcagtttcttataagactaaacttgcaaataccgtatgtgccagtaccatttacactcttgggcatttttcccagaaaaatgaaaacttataaccacacaaaatcgtgttcataacagctcgtagcagcattgtttgtgacagcaaagtctggaatcaacccagacgtccttcaatgggtaaatggtgaaaaaaactgttacatctgtaccatgaaatgctactccacaggaaaaagggactgaattattgacacaggccacaacttggatgaatctccggaaaattatgttgaataaaaaaggcccatctcagaaggctgcacaccacatgatttcattcatttatataacattcttgaagggagaaggtcagagaagtggagaccaggttaatggataccaggaattaagaatgaggttgggatgcgtgggtgtgtttataagcggagtaaggcggattctagtgataatggacattctccatcttgaccacatcaatgtccatatgctggttggtctaataccctctaagtttgcaagattctaccactgggtgagagtgggtaggggacaaaaaggacctctctgtattatacctagtgcctgcctgggaatctacagttatctcaaaatgaaacattttattatgaatgtatttactcattcaacagagaaaaggaggactttaatgggaaaaaagagagagaattgatgacattttatcctaacaaaaaaataacatactgaacatatgacatattttacatattccatataaacacgtaatttagtaatttaccatgttaaaacataatgttaacatatttgagctgaaatattttttaaaatgagagactacacattagatcagcttcttatcaggataatcacccacaagacctccaatgttagattttcactgagataatgctgttattaagtaaagaaatgaagcatattgctaatgcacgcacacacgattgtgaggagctgagggcagggtgaggcatgtttgactctggaagtatcaggcctgtgcagtaaactcagctctgctccgtatggagtcctgcggcctccacaaagagtcaccgctagctctcttgagctccagagcatattttgctaggccctgctccatacttcctaaaacaccactgcacagttgtcagtcataagagttcaactgccaaaaagattgaattatgctagaatgagaacacagcagtgttttgcatctcctcttatttctcgtgattgtgaaactaaagtgaaagagatcatttcaaccctaattctgcacatcagatatttcccatgtaattattaaaggaaaaaacaaacacaaatacaatgaaagaagaagaaaagttgtagttcaggtgaaatcagtaaccatgttcctctctctgtttttatttttggagggagaccatgtttggatacaatgaaagctgtgattgaagcaagctcacccctgtgcacctggggctgaccaatgtccctgggcttcttaagctggggtggttccctcctctggtcaggggctggggctcggcggaggcaggggcactggcttcaccccctcactctggtttcctttgcattctgcactgtggttagttgagtgaactgggtttcatcagtgtgttggtcaaaacccaagcattctgatcctgacagtgactagtattttagggggaaacagaggtaggagtctttacttagcctttgagcttacgccaagacctccaatttagacctgagccagaactctgcagctgagtagccaacttctatacaacttctaatcattttttaaatgacttgggttcccactctgctatcagcttatttgaagatagctcccgtgggagccctaggataagagaggttcttgtcagagaaagagacattgataagttcctggcttcaatttcatcttaataccataaaaaatacttgcccttcacactaaagtacaatacaccaccaataagagtgatgttgtaatggaaagtaattgaaatgaaatcttaaacatcatgagctcaaacatctagaaatgcaaaaaagaacacaattttcttggaaactcagatttagcagaggtctctgtgactacgtttaaagaaatgaatcaaaaaataaataattgaaaatttaaaacagtaagaacttcgtaaagacagtcataaaattagaagcataatggcccccaaatgctaactatacagggtagaaataaatgtgtaaatacatgaataaaaagagaaatagaagatgagttatctttaagggagataattctagattttcgtaattgaacatctggccacgagacaggaaaaagccatggagagctttgtgcttactctcagaaatgctttcacacctgaatggtgagagtttgcagaactctttatgcattacccttgattcatggagacaggctcttgatggtgttactgggcagcctagaacactctcagagcaaagggctcattcctggatgctgttcctacctcgacacgtgggcagagggctactccactggccgttgctccgacactgggctcgagacacgccctgcagcaaatagcccgtgttgcaggtgaaattcacgacatcattcaggttgaactcactgccattagtgaatccgtgggcagggtttccagggtgaccacatgtgatggctgtagagagacaggtcaacgtcattgttaaatattgaacaggtcatcactttcccttgggattattaataagaaacatgcaggcatgctaacggtatggactgaaggttttccactaaccaggcagcttacagatggtatttatattcagaagggaatattgggagctacaaccacaggctgacactacaggcttttaatataattgtggaaaataacaaacacctgccaaacacgctttctttaccatcataattattatttctctcttgaatcatgacagaataccaaatgatttaaaaacgaagcagtgaaaaacaagagatgctaaaaattcttgtattaatcatgagttttgaacattttctccatacacaccagctgactctgtgaaaccctccttttgagacagtatgggatttgtctgatactttttaatgtccatgtataaattattgcaatatcaatttacacatcatgaaattagcaaaataactaagcacactcagctcctatttttgttgagaatctctgtcatatgatcctttgaaatgcagtgaactgtcaatatgtcatgccccagataacagcaagacagatcagggagagatatccatcattcaccctttcaacagaaacacactacagtcataaaactggtgttttcttcctcatttatcttgtcaacaatttttttcctataagtaaagcttttacccgtgaactttgtacatttttcacatcactattacagataatctttgtcactgttttatccacatttcttttgtctacttcataggaaaatatacaatatttctaaaaacaattggtttaagggaaattgggcaataaagtgagagtacattgttcgaaaaatagtcaatatttacaatatttatcgctgaagttatacagctcaaggttgatcattcattacatgtaattttacctctttcttttttttcccttttttttttttttttttgagatagagtcttggtctgtcacccaggctggggtgcagcggcacgatctctgctcactgcaacctccatctccagggttcaagcaattctcctgcttcagcccctcctagtagctgggattacagatgtatgccaccatgccaggctaattattgtatttttagtagaaatggggttttgccatcggccaggctcgtcttgaactcctgacctcaggtgatccacctgcctcagcctcccaaagtgctgggattacaggcgtgagccaccacgcctggccaattttacctctttcaagtaaaagaaagaatgcttacaaaactccctatattcttgacgaagcaatgacaaaaatgtatgcaacacggatgaggcagggagtgccgctgtttctaggactgcaaagctgcccagcagacccagactctgcacctccaccctcctactatcagcttttctctccacccagtttatcctgtgataaaatcaaggaggaggaatccatgacaccacttggccagggatccatttacaatgaattgataagcaaattaaatgtggagtcaggaaaaggagtttgaaggaaacaaaacgggaaggagatcaaaaaaggaaagcgtgaacatggcacctctcctgttctctttctttgtataggcaaaactgaaagtttgctgttcccttttacagtgaagattaaacaggtgtatattgtgacctaataacaaaagacaatgtggcaaaaggaagcatcgatgaattcgtccacaaagagtgcacttacggacacagacaggcgtttgtccagaccacttgtggtcttgcaggcatatcctcacggaagttcccacaagccggaaaccaggattgcactggtaaaccaccgtgtctctgtaactgaagccatctccactaatgtgaccgttcacaatcgggtctggggaaccgcagtggccagctaaaaatgttaaaccaattttaaaatttagagtgtctgtcatttataaaagtagtacattcacaacttttattatcaagtcaataacagtattgaaggcgcaacatattgaaatctttatcattacatatatatgtatacttttaaatatagtttttcttttttttattattttttttcagaaatcctggaaaaaataagtaatatttctaatatgaaatggtttgtattttcctagttgtgattttcccatctatccatttcacttattttgcttacctgtattcagttatttaccttgttatactattttcaaaacaaagcaaaaagtaaagaaggaattcttggaattaacatgaacagggcttcttaacctattgattatgggtagtaaggagatcggtgaggggggcttccagtcagatagactagataatcaaattacctgtgaaattccaaatggaaagacagggatcagagaataagttcaatttcaattatgaaaatctgagttatgggtgagctgatgtctgagtaaaaatggcctggaatcagttgaaaagagaagtctagagttccagggacagatgtgctgaagttagcgtggacttgggacaacaggagcatgcacagctgacagctgaaactaaaggtggcagggcttactcaggtgcacagtgaaagaacaggaaggagcgcgagatcgcgacaggcgtctttacttaaggggagacagaatgtccatgtagatagtaaaacaattgacaaacatggcattgaaagagctttagtaacagagcttccacatggagacagaccctctgacattattccactcactcccaccattttttttctttttttttttggcagggtcttgctctgtcactcaagctggaatgcagtggcaccatcacggctcaccgtagcctcaatcccttgggctcaagtcatcttttggcctcagcctcctgaggagatgggactacgccaccatggtacatgctgccatgcctgagtaatttttttattattattatttttagtagagatggggtctcattatgttgttcaggctggtcttcaactcctgagcttaagcaatcctcctgccttggcctcccaaagtgctgggatgacaggtgtgagccaccacaacattttgttaccttctcttccatctccctcttctgcctctttactgctctcacttttccttctttcctttcctccaacttctccttttctctctctcccttcctcgcatatatggaaagggtattcttattaaattaacaaaatatacaggctgaagagtaacttacatgaattggacctgtgttacacatgggttttggagtcacaagaagaggaaaaacattcaccatgagttcctaaataatcatctttgtcactctcctatagttgcatcaacatttctttttgcttaattcacaggaaaataaagaatatattagaaaaacaattgctttaagaggaattttgcaataaagtgagagtacccgtattctaaaaataataatcaatatttatctttgaagttatagaaagaaacttttcgtaggaaaacagctacagaagccttcagtccatgcaaaatatcaaggcggagactttccctgcccacttatttccccaacagggaacacaaccaatgattctccatacaagttcctgcacacccagatttgagaaattacaaaattgttgtcatactcctttgggattaagtatatccttctagggagatttaaaatcataatctatatttctgcttaaaacaaagtttagaaacattgtgttctcctattttggagaacaaacttattatcaggaaggtaacattgcagaggagagagacagaagagaatctgatctctgcctcaactcgtagaagagattagaccacaaaaagccaggctagatttggctaatttttgtgcattggcaggtattccagtcaatcggatcaataagtcagttctggtgatttgtcccaatcactcccacatatgagacttgatacaagcggagaacgtcgatgagggtgaatgttctccatattgtgaagagagaccccctgaaggcacaagtgttatcacaggcacagaggacattgtctctgaaggttcccctttccagacgctgtcctttgcacaacgtgctctgtcgtgcatgggggagatggagccatcgttccaaccctagagacagggagacgaggactggtgagagccagaagagcccatcagcccagcacaagagatcccagccatttctgaggcgaggcatagaatagctagtttctagaaacacacaagaaaatgacaccagcaattccttttggaattacttctgaagcctggaaccactccaagaggaggggatgtgggaccaaaggcaatagtgatgtgaaaaggggtgcattttaacagagctcctctcattttagggaatctgttcaggtctcattcttgacttagacaaacaggactccttttaaaccttaatatttttctgaactgagttttttgtaagtgcacatagtttgaagttgcactcttctttgggaacctggcaaacaaggacttgtaatggtcaaggaagcatctgtgtactctagaaatcaggcagcaagcctgacagccatgactgtaaataaagattcccaacagcaactcctctctgacacatggtcatttcggttctctgaggaattggcaccaaatgcctaaagaaaacagaggatgtccttcaaaaacatttcattttacctccttgcctgaagaaaaaaaagttatgtatcagcaggattgcctagtatctaagcttcctaatacagaacaattatttcttcattgtggcttcctattttgaaacaatgagatagcaatctgtttttcacctgttatcactttccagccatccgttaattctgttttaaaacattcaaaatctttgaccaattatagtctattacaaatagaggataaccacacaatttcactcacagaatactctttaacccaaatcttaatgatattgtgtcaatatgttgaggaagggaaaattgcattaggaggaatttgaactcaatgaattttgagctctattttaaatttaagattctattagtctatgatagtattattctatatgctttgtatgtgagttaccttttcttttaatatctctgatgtagtcttggttttgagtcatctacacaaaacctagaaagcctctctgtcttccctcaggatgaaatgtaatcaagttcatgcttctctgctgtgtctctaccatatcagtcacacactgagtacttgttgaaatgaacagaaacagaataacctcaccactgggcagtcatgtcctttacattgtctcctatgtcaccttcatgtatttgacaataattcatttatttgacaataatttcatgatgatttgttgtgggttgcaatgttcttggggctggggattaaacaaggaataagacacaatcgcagagggtaaacgcagaggagcagctgtcacgtgcagagtcctgagggtgtgcggacctagcaggctgggaacgagtggaaggaacactcagccatgctgaggaccaggactcctggtgaaagaggtggcatttaaagtctgaaggatgagcgcttgttagccaggaaaaggtgatggcaagacattctagccacagaaattagaaatgttatatatttttaaagcatctgttaaaatatgaagactatgatgtcaaatgacccagttatacatttgctaggagggtgaccatttgcatcctgtccagcttagtacatagtaggtgtcagccccactgcgtgactctgccactatttgaagatagttgctacaactccactgagtatgcacagtagcaaaggaggataagcaactctattcactgaattttttttttaaagaaatgaacgtggggtgagggcagccctgcacacttcaaaaccaaatatcatctagtgataataaaatactgaaattcctcagtggaccttacactatgatgccagagcccagaggctgtgatttgtcttgattttgcagactttgtttatttattattcattgacgtttagcttcagtttaaacaaaaactgcccaatgtctccaacaggcaattgtgtagcaacaacagtcacagctcggacatcatgaagcctggatttcttgagaagtgtgtgtcagaaattgtcctattaaagtgtggaaggaaaaccttggcaagaaagcaagtgacccactttactcttaaatcaatcttctgcgtgaatttattagtctactagtaatctgaacccagcaggactgagaagcaaatggttgaagaattaggaaagaatgctatgcaactgtaaattcatatgatttttaatccaatgtatatagatagacaatgtaaatatatcctcatggaattgcagaatttgcttttagctcaagcacgaattaacaattcaattactaccacacttcatgaattttacattttaattcttcattttctccatgctgagaacaggtatgactgtggacagggtaattcaccaaccacttaaaatggttgagagaaccagtaacggaaccaagaatgaaatggtctgctccagtgactccgttttacacactgttctacaaaatatgtcattggaataagaataccgtggccaggcgcagtggctcatgcctgtactcccagcactttgggatgctgaggtaggtggatcacctgaggtcaggagttcgagaccagcctggccaacatggtgaaagcccatctctactaaaaatacaaaaattagctgagcaaggtggcacatgcctgtagtcccagctgctcgggaggctgaggcagaggaattgcttgaacccgggaggcagaggttgcagtgagccgagattgcaccactgcactccagcctggacgacagagcaagactctgtctcaaaagataataaaaacaataacaataatacggtgaaacttcagaaccattgaggtgttatacgtatggactgtgcagtaccctgggtgggacccaggaatttgaacgtctttcctgagttacaaagagtttccgtaccataagctttgaaaatcactagcttttcagtctactctattctgtgtctgatgaaagctttgttactccaaggaggaactggtaccattccttctgaaactattccaattaatagaaaaagacggaatcctccctaactcattttatgaggccagcatcatcctgataccaaagctgggcagaaacacaaccaaaaaagagaattttagaccaatatccttgatgaacattgatgcaaaaatcctcaataaaatactggcaaaatgaatccagcaacacatcaaaaagcttatccaccatgatcaagtgggcttcatccctgggatgcaaggctggttcaattacacaaatcaataaatgtaatccagcatataaacagagccaaagacaaaaaccacatgattatctcgatagatgcagaaaaggcctttgacaaaattcaacaacgcttcatgctaaaaactctcaataaattaggtattgatgggatgtatctcaaaataataagagctatctatgacaaacccacagccaatatcatactgaatgggcaaaaactggaagcattccctttgaaaacgggcacaagacagggatgccctctctcaccactcctattcaacatagtgtcggaagttctggccagggcaattaggcaggagaaggaaataaagggtattcaattaggaaaagaggaagtcaaattgcccctgttggcagacgacatgattgtatacctagaaaaccccattgtctcagcccaaaatctccttaagctgataagcaacttcagcaaagtctcaggatacaaaatcaatgtgcaaaaatcacaagcattcttatacaccaacaacagacaaacagagagccaaatcatgagtgaactcccattcacaattgcttcaaagagaataaaatacctaggaatccaatttacaagggatgtgaaggacctcttcaaggagaactacaaaccactgctcaaggaaataaaagaggatacaaacaaacggaagaacattccatgctcatgggtaggaagaatcaatatcgtgaaaatggccatactgcccaaggtaatttacagattcaatgccatccccatcaagctaccaatgactttcttcacagaattggaaaaaactactttaaagttcatatggaaccaaaaaagagcccgaatcaccaagtcaatcctaagccaaaagaacaaagctggaggtatcacactacctgacttcaaactatactacaaggctacagtaaccaaaacagcatggtactggtaccaaagcagagatatagatcaatggaacagaacagagccctcagaaataatgccgcatatctacaactatctgatctttgacaaacctgagaaaaacaagcaatggggaaaggattccctatttaataaatggtgctgggaaaactggctagccatatgtagaaagctgaaactggatcccttccttacagcttacacaaaaatcaattcaagatggattaaagacttaaacgttagacctaaaaccataaaaaccctagaagaaaacctaggcattaccattcaggacataggcatgggcaaagacttcatgtctaaaacaccaaaagcaatggcaacaaaagacaaaattgacaaatgggatctaattaaactaaagagcttctgcacagcaaaagaaactaccatcagagtgaacgggcaacctacagaatgggagaaaatttttgcaacctactcatctgacaaagggctaatatccagaatctacaatgaactcaaacaaatttacaagaaaaaaacaaacaaccccatcaaaaagtgggcaaaggacatgaacagacacttctcaaaagaagacatttatgcagccaaaagacacatgaaaaaatgctcatcatcactggccatcagagaaatgcaaatcaaaaccacaatgagataccatctcacaccagttagaatggcgatcattaaaaagtcaggaaacaacaggtgctggagaggatgtggagaaataggaacactacactgttggtgggactgtaaactagttcaaccattgtggaagtcagtgtggcgattcctcagggatctagaagtagaaataccatttgacccagccatcccattactgggtatatacccaaaggactataaatcatgctgctataaagacacatgcacacgtatgtttattgcggcattattcacaatagcaaagacttggaagcaacccaaatgtccaacgatgatagactggattaagaaaatgtggcacatatacaccatggaatactatgcagccataaaaaatgatgagttcgtgtccttcgtagggacatggatgaaattggaaatcatcattctcagtaaactatcgcaagaacaaaaaaccaaacaccgcatattctcactcataggtgggaactgaacagtgagatcacatggacacaggaaggggaacatcacactctggggaccgctgtggggtggggggaggggggagggatagcatcgggagatatacctaatgctagatgacgagttagtgggtgcagtgcaccagcatggcacatgtatacatatgtaaccaacctgcacaatgtgcacatgtaccctaaaacttaaagtataataataaaagaaaaaaaacttaaaaaaagaaagctttgttactgtttgtaattataaactgctattatattttgcttaaaatgtctcaaatagaaaaaggggagttattttaacaatctttctctaaaattggatttgaaataaataaaagctaccaaacatttgaacaaagcacagagactggtagcaagatggatggagtattgagtccattttcatagcaaagaaatagagtatgtcgcaagcaaaatgtcaggaagaaggctcgagagggaggaaaggcctaatttcttgattggtcaaggtttccctgcaaactacatttgtgccagagcagtcaggagggcagaaagtggctgaattccctttgtgaggtcagttgagtctgaggttcattagggacacacacagggaaaaccactcactccattatcacccgcacagtgtggcccacccttagaccaggggaggctgcacacctgcagtttatagaattcaacacgggagagcaggggcctccgcaaggccagcctctcaaagcctttgtttctagagttccatgtaaattccactgcacaggtcttttagtgtaagttataaaacaccttgctgagagaacaaaaggttgttttgtttgttcgtttccagtagagtgaacactcagaaactggctcctgaacgaatccggttccttcagaactccagcatgcccccctgggtgacctatgttttctggaaagcggttctacaaagctgtgttttagaggaggaatcttactggcagacaggatttggctttgtttagctatccgtactgtttctgcaacacttgcttttgctactgaaaggagttatgcggtttgcaacctaaaaccaccacactgattgtcagtggtgactttctgagtgactgacgcaaggtggaccctcaaagagacctgaggtacttgttggccgatttaccttcacatcataacgcacgcagagtgaacacctcacatgcaagtacagcaaggtgagagtctccgacaagtacctagacctgtgtgattttggaaatgggttccctgatttggaaatgtaataaagttccactgtttcacttctcccgcagaaaccccatataccagtgggaatgttgccacaatgtctcccatgacagcggacagacctggagccgtgcattctttggggaggaatcggctccttccattggagctgtaggatctctcccctctcaccaggtctcccacacacgcacttttgcccctagaggggcctacttgaagctcacgtcttcagtgtgcaggtttgtagcaggacaaatactaaatattggtccggggattagaacggaatccatttttagaaaatctataaaccaaatattcaacctcagtatttgctttgtgattactggtacttattgctgaaaataaaatacattacaaatatcctgggcctgtaggggaatacaatatgctttattctatccattctatgcaataacatggtctttggctaagtcagagttatttgggcagtagattccaaagccaatttgcaaacttttcttcagtattaacaaatggtcataaaatgtcaggtgcatcagattcacttataggcaggaaaaactattattagcagtacacttcaacggacatattgaagtctcttgatctccatatgctaaagaaacacatttgaatattgataactgaggtgtgttttttttgcctccaagtgcaatctctaggggcaatgctgaccgacttagcccatgcatagatatgcatatggtatcacagagagtgtgtggaatttgtccaacatggaggtattgggcttgcagagcatacaacactctgtgctgtttgtgacagcatcaaacacgggcccgagtcctctgccacaaatccatttgatcagatctctgcttcacacatcttagtgaatgacagcttttttaaaccagtttggtttgaagaaaacctcaaaccagggccatcatttggactgtctttggggctttcagcattctttttatctattcctgtctcaatgtagttcctgaatataccccatttccaccttcttccctgggcctatcctgcctcattgtcctcaagctttgtctgcagtcttgcctgccggtgtcacgtctttctgtccctcaaacttcagtccaaatccaccgcaggtgcgcatcttccacaaaccccaaaggaagagctgcccattcatacaggaggcaaagatctccctgacttcaggtttctcctacaataggagagcctatcttcggtgttgcctgtttaaaacacccagactcctactcttctactgtgttttgttttagatgtagcaggtggcattctaatttttcgtacctatgcacttcccctattggactgtgagttctgagtgcagcaccatgccttgtgcatgtgcatcaggactcagctcaaaacctgccctagagcgggtgtcagagttatcagatcttttccaccatctcgtggccctatcagtccaggctcttatgaccaggcggccgtcgagagttcgaccccagcacctgcttgtttcaggcaagtccgacttccttgggccgcactccgcatctatgctgttgccaccagggttgcagctcttgatttctggaatggctttaccccatgcctgcttgctggaattccacccagaatcagcacggcttcccccacatctactcttctgtcagcctctaggttgctcccactctcacctggatttctcaagtaatgtgcctatatttcccttttgccattattctattcccaactttttttttttttttgagatgaaattttgctctgtcactcaggctggagtgtaatggcatgatctcggctcactgcaacctccacctcccgggttcacgcgattctcctgcctcagcttcccaagtagctgggattactggtgcccaccattatgtccagtagtagagatgaggtttcactatgttggccaggctggtctggaactcctgacctcgtgatctgcccacctcggcctcccaaagtgctgggattacaggcgtgagccaccgcgccctgcctattctcaactttttattaaagctacttggtatttaccttatttactccttagagtatagatttcataaaagaagaaccaatcttattaacctctgaatgctgcaccatagttcttgaggaacaagaaaaatatcattaaatactattcagaaatatgacagaaaaacccaccgctgagaagtttgctagttattccccagccactgacaatgcatttggaaaatctgagaactggtatagggagttttcctgactaacatacagaacatattttacacttaagacggtatggcaaagatgggggtggggcaggggaggcagtgctaatctttctgctctgctgtgatataagcattatcataatcagttgttttattaaatattttatgtggatctttccaaaatacaaggcaattgaagaatatatttaaacttgactatctaagaactatgaataactacagtctaaaaacagtattttgaatcatgtcatctagctattttagccacataaataaccattatattgcatttacagaacaattcatctcctcatggttataatagcgcaataaatgcaaacttatttctaacaatagcaaaacaatctaataaaaaatgataatgtcctctatgtgggaaataactcaagctaccactaatatcttgaatactagagattgaagaggtaacatagtggagagaggatgggttcttatgtgctgaaaagtctaaatgatgtaaatgttttcaaaatatgaatgtgggattctgtgacaggaaacctagaccacaaactataacctcttcctagtttgtgtgttctctgttggtttaagcaaactaccgcagagaagataaacaggagaaaataattaagggatcatgtagatcacaaacttcctgggtggattagcaagtgcctgagagagtggataccaggtcagcattctcagtgcttaattctgtggcctggggagaggtgtagcattacacagtacagttggtaaattagagcaggtccttggcaatttacagaactctgaactctgggagatcccagtaataacgcaggagtgatcgtgttgatgaaggtgggctaaattttatactaatgtactcggatgcacctgtgcattactttgctcaaaatctatttacaatgatatttacatgcacactccaatttctcacaaggttcttcttagaatccagaccagggacctaaaacacagcatggattgagttcttgaatattaggtgtagaaaatcatcttttctttccttaaatacagctgtcctatagttgacattctcaagactcagtctgtcaacgctcatccattcctgtgtttggccactccagctgcaatactcaaaaaggattccagcatattctcccatgttggaagtcactggaaacaactagcatgccagcagtatgagtcatgttgcgatgaaactgaagcacaatctcaggaaacagtattctttctagtagccccaaaaataaactacaaaatatctcagccacaattcagggaaaaaaaatgcttttgtcaaaaaatcttgcaccaggatggaaaacatattggacctaaggtatacagcccaagggaagttaatctaaagaaccaaagtggaccctgcttttgcataaagtcttagttgtcttgtttggaagatccacctgtttaaaaatacacaaatgaaaggggatgtggggattttttatactgattccaaaagctctctttctctgtacacagtgcctgcttcatatgattggctgtgtccccacccaaatctcaccttaaattgtaataatccccacctgtcaaggatggagacaggaagagataattgaatcatgggggcgggagtttctgttctcatggtagtaaataagtctcacaagatccaatggtctcataaaggggagttcccctgcacacgctctcttgcctgtcaccatgtaagatgtgcctttgcttctcctttaccttccaccatgattgtgaagcctccccagccaggtggaactgtgagtgcattaaactcctttcctttataaattacccaggctcaggtatgtctttcttagcagcgtgagaacagaaaaatacactgctattacaaacccatgaatggaagtatgcacatatgatgtctgcatcaaccctgggccttgtcttggcagatatatgcaattaattttatgtttgtttcttttttcccacccacatgttcctgattaagatgtacagatgtcagcatggtcttcatgctgactctacccgtcagggctggcactgatatggaaaacaacttcccacaactagtttcttccatctttcacctgatagcattttaaatatttgaaaatagttatgaatgactactttacttttctctctgtcagagtaatatcaaaaattttccagcctggtgtggtgcctcacgcctgtaatcccagcactttgggaggccaaggcgggcagatcacccaaggtcaggagttccagaccagcctggccaacatggtaaaaccccgtctccactaaaaatgcaaaaaattagccaggtgtggtggtgggtgcctgtaatcccagctactcaggagggtgaggcaggacaattgcttgaacccaggaggtggaggttgcagtgagctgagatcacaccactgcactcagcctgggcaactgagactccatctcagaaaaaaaaaaaaaaaattccaaacagtcctcaaagatcataggtaccagatccatcaccacaaatgcatagcaattcctcaagagcccacttaaactattaaaaaactgaagtcatgattctggatatgggattcctgggcgaacagaggatgggaagaaccttattaataagactcagcctgagcattgcatggcagcacttgtcacatatgagcctgctcttacccaaaactcccaagttctctgcctctacactatgaactcagaatttcttctcctcatatacattgcaattattttatttctactctgagaaaaattttacattaatttctattatattattttgtttgtcctatcgtgagaatttgagatcctgaatccatcatccaatattattttcactctttcaactatgccctgatcgaagataggaataaaatttttgattcagaaacatttctgaatagtacttatgaatatccatctcataacaatattaaacaaaaaaaaatggatgcaaactcacatggtgtcttggaaactatattagttctatgtgaaaatacatttccaaagttacttatgaagaatatgcttgggtatctgctctatatatcatcaagtcaatttatggtttttgatagctagcttcttttcctgcttttcctgttgtgagaacaatcacactggatatgagtttcactctaggattcttcctttccataatatctcaccaagaacactgccagtaactcagcagtgtgatttttagtcccctcagctgattcggatgaaattctcctgggcaggagacacaacttcattgagaactctgaagttctcttttataagctccttatctttggggcgtgccagtttctgattttaaaaacgtcccgcctataatcccagcactttgggaacctaaggcaggaggattgcttgagcccaggagttcgtgaccagcctgggcaatttaggaagaccctgtacctacaaaacaaattgtaaatagttagctgggcatgctgctgtgcactgtggtccaagctacttaggaggctgaggtgggaggagcacttgagtccaggaggtcgaggtagcagtgagctgttgttgcaccactgcactccagcctgggtaacacagtgagaccctgtctcaaacataattaaataaataaataaaaacctcctaacctgtgtattccataataaagcttcttcatgatgtgcttattacacaccgtatgtgtgtaacgaaaatctcatgtgccccacaaatataaacacctaatatgtatccataaaaattaaaattaaaaaagtttttaaaagcttcttaatgaaaaaaaaaaacagaactgaataagcatccattttcataccagtttcaagaatgaatttggttcttgtttcaagcataactgaggcagctctcttggggttcctcacccttcacatcatttccagtttgtggtggatttgtccctccggacactctctttaaaaacgcattgcattctcttcaacatgtcctgggacagttgctttgcttgaaaattgaatttcttgcagaaaatctggtatagctgtctctgtttgtttgggtaatttcccattttttcctgattggatgatttgctttttaaagtcatagttttgggggttgttttgttttgtcaaggggtcatcatttttagagttgaagccatgattatatagacacagttttcagaatatatatatatattttgattcagaatcacttctgaatagtacttatgaatacccatctcataacaatagtaaacaaaaaaaaggacccaaactcacatggcgtcttgtgaaattatatatatatatatctccttaccaactgcatctttagtaacagtcatttccccactacaagtatctcgtttaccccggcatggtccagatgagcctgaaggttactcaaggacatttaacttggtggaaacccaaagtgattttcaaaagagccgtaaccatggaaacagggaaagggttaattcaaataacaagttaagagatggaagaaaagcaatagcaagactgataggcgagagcgtgtcagcatcctggcagtacaggatgaaggacacaattagccaggcagaactaaggcacaaagacccttgcacctgccccttgcatgcgcctccagaggggactaatccaggttccagagctcatttcacttctagttaacacaacacactcctccttattggtctgaattagcatgatagtattcttggttttatgatgttgggcaaattctgtacttctctatgctttctttcttatctgcaggtcgaaggaataagcacttcctgtacgttctaatcagataaatctcacaaatgccatgtgcattttaaatcatcaaaaaatatcatcatttataacctgcctccaaatatggcacctagttgatatttggattatggaggtatccatttgctactctactaaatatttgtgtagatttaggattgcagcctctgttcccttcatctatcttagagtcatacaatctactcaagcaatatcatctctgttctcctacctttttactcactcatccctattttcctctgagtctcacatgcaactttatggtttcttgtggacatatgttcttgctgagtttcacatgctgtcgccccccagcaaaagatgtctttgataaaggaatatgcttcattaccatgcttcacacgttatgaatctcaaccctttccgttacagtggtagctgcaaaaactatatttattaactttcaaaatgtttgtgctaaatgaattactcatggtttacccattagtatgtacatatgtatgtgtcatttctaatctttttctattttttccctttaaatactctatgtctcttccaattttattattccttatatgctgtatccaatatctacaacacaaatgttttatatattataacctgggcatttttcttcttccttattttcctctgagcaaatggactcatttctgagtgaatcatctttcaaaagctgctaagatgtattgcatagcactgagacatgtttgggggcatctccaggcagccaactattcaacatttatctcatcctttctactccaaaaccctaactttcagacacaagaataacacaagatagataaaggcttatcagggatcaataatccccaagctgacccatcatttaacagttatgtaaactgaatgtatcacttaatctcccaaagcaccaacgaaggcctttcctgcatcctgtattggtaatgaccaaaaggatgagattacggatgtttgtaagcagtagagcagcaatcaactgtaagttgctgttaattttcatgtttacaattactaatagagatgtggtacatactgtcagacgtgagtgtctcggaccacctagctccctcccagtggaactgggctccttcagaggaccaagctccaggcagaagagcttgtccatatcaaagctgcctaaaggagagtgctgttccatagccaatttcagaaggatatttaggaatgcatggaaactcctagaaggacttgtgactctctacatgaagaagcatacatagtccaaggaaatgtcatcgtctactgaaaactgtaatgaggacacccaacgacagacacatatgcacacactcatatatataattgtgttcaataatatataatgcactaaatatattacataatacactagacagagtgagaaagagtgtgagaaaccaagcagcattcctgtaagtcctgcagtgatttaaaataagtagataatgtttcacagacaagtgtgagaacctccttttggtggttggtttttctctagggttactactgtcctttcatcttgtttcttcaaattctcccaaatgaaaagaagaacaggttttgctatttgaagtttactgggcctggcttagttcctgaagtgatctttgcccatgcagattcagaagcttaaagctcccagtttctatggctttgagtgatttaaaaaaaaaaaaaaaaaaaaaaaaaaaaaggaagaacgcgtggagaaggttcagaagaaccaaaggcaagtaaggtattttacaaatcaccagcagacctactaagatcactctttactaatacttgttctttaaactgcttattcaagatttttcatacacttattcaaagaattttccaatggaaacatttttcaatccattttttaaattatgcagaatattttaagtttttgaaaaaagaagactacattattgtagacatatagcattttaaataattcactgtacttatgtcaatttggatgaatataacttcaattcattgacataattttaaaatttttaaaaacataaaatgtacaatatttttgaaattcatttttgtgtgtcctaaaaccatgatggcatttgagtgcaggtacattctcagcactcttgcaagattgcctttatggcacttaaggcaatatatgactttcattcattgctcggattaaaaacaaatccctgtagatactcaaagaaaaaatcacactgggaggtgcagcatttccaccccaggtaggatttaaggcattatagcaagaagtcatatgtgttacacagctgtaatctatttctaaggtttatctgcattaagtaagtgccagaacacagatgaatttacccagacatcgagtttcgctgccgctccagagcccatttgccaagcactctctgacatgagaccccacaagcgtgtagccggtgttgcacgtaaatatagctgtggccccataaactgtcaacgttccaatcttgttgccatttgggggaaaggaaaggcttccacacgagataactagaaggaaaaacaataaaatgaacatcaattcagttatgcagattactcctgtgctccaaacaaacaaacaaaaacaaacaaaaaaaaccaaaaaactatttttagtcttaattttcactaagaacatggttgagagtgtctgcttagggctggatagaccagtcacttaagaagcttaattttccatctttatgctcctgaaacaaaaacctaaaagcttaacgtggattccaaaacattctagattcctccaattacccattaacttttgttgttgttgttggcatggagtcttactctgttgaccaggttggagtgcagtggcgctatcctggctcactgctacctctacctccccggttcaagtgattctcctccctcagcctcccgagtagctgcgattaaaggcgcctgccaccatgtcccgctaatttttgtatttttagtagagacagtgttttgccatgttggccagactgatctcaaactcctgacctcaagtgatcctcccaccccagcctcccaaattgctgggattacaggcgtgagccactgtgcctcgacccattaatgttatttttattaccatcctgacaggtatagctgaaccattcttgaaaaaatacacagtatacaaagtataaatgcagaagcgtgtcaatcaaataaattgtctatctctctacctttctttccatatcaatcccaagaattacatagtagtaattaccagaagcctcaggagcctatcaggaaataaggaataccaattttcttcaccaaagcccatcagctgggacaaagtagtgtggtattaaaatctaggacttcggaatgcaatagcagtgctcagtttatttgtttttttagttacttgcataatttgttgggctcatgagctctgtaagaatgctgactacacagggcatttggaggctttccacaaactaaaacgtgcatacaaactagaccttaactgggtgtcgatggggtgaccctatgccccatgtttacacctgccgtcttagcacagttattgatcgtgtccattttcactcatgaaagtactccagtttggcaaacaagttaatggtcaccctcattatatattcttactacaccactgaaatctctgctcttcagattcagaaacacttgagcacagaagatcatggcctctcaggggagggaggaactcacaaggttatccagcccaacctatcatcagaggctgaaatatgttttgaacaggtaagaatgaaagtgttagaaaagctattcaaagcaagcattaagagtgctaggtgagcactgatgtgcagggtgcttcgctgcagcctgcagtggcaaacatcgagttcttccttattcacagtaaaccacaagaggcagtaaagcacagtgaggaagaacacggattctggctgtaggctacccagggtctggttctgccagacaggagccaggcagcacttgccaattttctaagtctctgggccctgttatgggttgataatagctcctactgcataggcttgtgcattagattcaaacggaagccatccctcgcacataagcaggcttaatcagggttaactaacaatgaaagtataaatcaggacctatttagtcaattgaaccaaaagtagaaaaacctttagagataattcaagtgaggaaaataaagtgatgcatgtaccactaaaaccagcccttttgttgttgtttatgtagacagagtcttgctctgtcactcaggctagggtgcagtggtacaattgtagctcccagcagcagccctgacctcctgggttcaagacatccttctgctcagcctcccaagtaccttagtgcatgggcaccaccacgctcagctatttatttttttaatttattttttgtagagatgggggtctcattgtgttgtccaggcttgtctggaactcctgggctcaggcgaatcctcccatcttggccttcccagaagccccagaccttttaattaagctgtctttactccatgttatgataggacaaccgaggctctatctcaaatgttcagacagagacacccagactgagttttctgtggggtgcactaccagaaattgggaggtccaactcgagagtccatcacgaccagcacactattgttattgagacagcctccacgatttattggttttggggattgctaaactattacagtgtcatatcgtttgcatttagtaatatgctaatatgtttgctctaccaaatgttaatgaactcgagtaggatttagatttttacaatttgttataaacttttcattaagccttttcccaaacagggtgaacttgtccttcaactatgatatttaaagatccatttgtagcaatttaagataattggatcttgtcttgaaacttccatgcttgccagaaaataacaatgaggtctgagtcgaattcttcttggaggtttcagcgcaccttcgccttcaatggtagagaagcaagaccacctccctctgctcgtatggctgtttctattgttgaagcctctgttaaaaatattctggtgacaaaactattttaagtttgtcctctaacaagatttactcaattgtaaagaagaagtaatggagcaaaattttagcttttcagtagctgaataatagaatttcagacccagagtttccttgtatggtagtaaactcaatgcattaataaagatagcagcaataactcggaaatcttgcctgactgaaaaggggaagcccctcactactaaaaataggctttgtcatacaccgaagggaaagccttatttttatgttctttttcctctgaagtttctaaaaatgaattgcttacgtttgcctttttttcatttcattaaaagtgtgtccacgctcacagtccgcagtgcttcctctgaactctgggagcaagtctttgcacaaaaaagacacttggctgacagcatccggaaatcacctgcaatcccaaagcctccggaatgcacctgcaatcccacagcgtccggaatgcacctgcaatcccacagcatctggaatgcacctgcaatcccgcagcatctggaatgcacctgcaatcccacagcatccggaatgcacctgcaatcccacatccatagcatctggaatgcacccgcaatcccacagcatccggaatgcacctgcaatcccacagcatccggaatgcacccgcaatcccacagcgtccggaatgcacctgcaatcccacagcatccagaatgcacaatcccacagcatccggaaagcacctgcgatcccacagcatctggaatgcacctgcaatcccacagcatcaggaatgcacctgcaatcccacagcatccagaatgcacctgcaatcccacatccacagcatccggaatgcacccgcaatcccacagcatccggaatacacccgcaatcccacagcatccggaatacacccgcaatcccacagcatccagaatgcacctgcaatccaacagcatccggaatgcaccggcaatcccacagcatccggaatgcacccgcagccccacagcatccggaatacacccgcaatcccacagcatctggaatgcacccgcaatcccacatccagagcatccggaatgcacccgcaatcccacagcatccggaatgcacccgcaatcccacagcatccggaatgcacccgcaatcccacagcatccggaatgcacccgcaatcccacagcgtccggaatgcacgtgcaatcccacatcgacagcgtgttttctcactgtccctggggattccaagccactagcctctgttcccacaggaaagtctcttttttgtctctccttcaattctatgattatattcacgttgaaatatatcaactttaaaaaacacttgtattgtgacatatcagttctcatacctgtaaggacagcactcctatcagaaatatgaatattacttgtgagtgtgacaaataaacataaactcaagagtaggtcttttcaaatacattctagctaaaaaaaaaaaaaaaagctaaatgaacatgcagacctccatgaagaataaacagctggcaagagaatgtgtgagcagggaggggctctttaatatgaataaaaggctcagtggactcacaatggctgtttgcaaatacacgaaggcactccgtatagatcagagtcaggaattgttttattaggcctagagagatagagctaccatcaatcactggatataagtcacataggaagcctggcacaaagtaaaaatgttcaaacatgaaatcagctgtctctggggcaatgagctgtcactacagttatttgatgttagctgggcattgacttgtgagaatattatcaagaaaattcaactgcaggtagtcctgagtgatgtccaatgtccactccagcaatggaacgaaatgacaatgactacgctgtggtttcctcggatatagacgaaatacatctgctgataaacacaggctcccatacgtttaatgatcaatccaggcctgcctccagtaacaaacagcagatcttcaaagaccagcccggacacagacagcccagaatttaggccatgttctttgaatatctacaatattacaaaattccagtgtagctcactgagtcagtgtgtgtgtataaaattaaaaatgcaaaaattattttttctggttcagggatttctgtgataaatgtttttctttttaaatatgaacagtaagtcgaacaataaataaatgtaataagacaagagtaagagccttctacttgtgtaaagactttgtgctaggaaggtgtgtagccgcctctacatattcaattttaactttctcttattgtttcttgaaggacaggactgcagagctcactgtttaagggtgactatgctctcctgtccattcattcatggagacctgagtttttctctagggacatattaaagtagcctggagttagaacagcacaaacccttcaaaaagtggtaaatttctcagcggattccacagttgtcatgaatgtgattaataggtgatcaaggctcacctcttcatctggagctacctagacaagcagaaagggaaattctatttccagctcctaagcaaataagtaactgaaaacatttaatttctgggagatcttacaagcagggccactctaaaatgaacactggggagtcaaaaaaaaaaaaaaaaggaaaatgactgctccttacctgcaccaatgactcgggtgatgctacccttgaagattccgttggtcctgatccaacagaacatagagagtgacactgtgtatcttctatgaagaagctagcacagtgtggaaaattggccttacaaaaatgtgtcatgttcattacttttaattaaggaattaaattatgttttaatttcctggggtttatcacacacttatttaatagtaaattatattattaccaggattcatggtgtggtgtgtgtgtgtgtgtatgtgtgtgcaaagtaggaaacatgagagataaatgtaatttaagcatagaatgaaataaaaatgtgttacagaaaaaatgaattaatgtgtttattgatttttttcttgtagatcccagataatgtttacattttgaggttttttttggggggggagggcagtgggggaggttggggacagagtattgctctgtcgcccaggctagattgcagtgatgggacctcagctcgcggcaactgccacctcctgggttcaagcgattctcctgcctcagcctcccaagtagctgggatcacaggtacatgccaccacacgggactaatttttgtattttttagtagagacagggtttcaccatgttggccaggttggactcaaactcctgacctcaggtgatccactcgccttggcctcccaaagtgttgtgattataggcatgagccaccatgcctagcctacattttaagtttttaaaaattgtgtttttcactttcttttgggtgagtaaagttttaaaggtggtgtaattctcaccaccacattgcctgtgttttctctgatactattaagtgactttcaagagagtagatggttaccatgttgaggaactcaatatttgtcccaagtaaataaaatcaagaatattgaatattgcactaaagctggttgtgaaacatacatagataatgacactagtactcatgaaaatccatgttggagggaaacacaagacaactgttgttcgtactgttccctccactgctttgtgtactgcctgcctgtgccttggatacacgtgccctaaaactgtgtattgtgtggtgttattctaaaactgtgtattgtgtggtgttattctgaaaccgtgtattgtgcggtgttattctgaaaccctgtattgtgtggtgttattctaaaactgtgtattgtgtggtgttattctgaaactgtgtattgtgtggtgttattctgaaactgtgtattgtgtggtgttattctgaaactgtgtattgtgtggtgttattctgataccgtgtattgtgtggtgttattctgaaactgtgtattgtgtggtgttattctgataccgtgtattgtgtggtgttattctgaaactgtgtattgtgtggtgttattctgaaactgtgtattgtctggtgttattctgaaaccgtgtattgtgtgctgttattctgataccgtgtattgtgtggtgttattctgaaactgtgtattgtgtggtgttattctgaaaccgtgtattgtgtggtgttattctgaaaccgtgtattgtgtggtgttcttctgaaactgtgtattgtgtggtgttattctgaaactgtgtattgtgtggtgttattccgaaacagctcttctaaaaatgggatccaagaactcctggacttctctgatattcttttagcggtcaacaagcatctccctttccaatgactacactaccaaccatcaatatattttattttacatatctccaccaaaacaacaaactttgacaaagttaatgcagaaggtgctgagaatccagccaccctgtattaagccacacattaaggggctttgaaaaattttaaaatgatgacattcttcacattaatttttgctttgtttgaaaatgaatccttattgttcataaaaatgtgttacttatgtgagcatgtaattgatatgttattttaaattaatacgtaaaattgtatccgttttagtgtaaataaattaacaaatcaatattttaaaataataatagtttttaatgtatgatatagttataaaaaggtctttggggtccagtggtaggcagaattcgaaggtggtccctacgtgtcccacccctgagtcgagacatctcctcaaatcctctccccctgagtgagggcagaactctgaggatgttaggagtcagctgactttgagttaataaaaaatgagatgatttggatgggaacagcctggtgagggaagcccttatcaggaactaagtccttcctgaagtcagagagattggactcaggagagggcctggtggggtgggggacagagggccaggagcttagtatttccccatcagcagcagcaataacatcaggtcctcagccacacaccacaaggacatgaactctgcccaggagccaggtttgggaagctgatctgaacctcactggacctcgctggatcccactggagcccactgggcctcactggacctcactggacctcactcggcctcactgggcctgactggacctcactggacttcactgggcctcactgggcctgactggacctcagtggacttcactggacctcactgggcttgactgggcctcactggacctcactggacctcactcagcctcacggggcctgactggacctcactgacttcactggacctcaccggacctcactgggcttgactgggcctcactggacctcactggacctcaccgggcctccagccctgtcaacaccgtgaactctgccctgtgagaccgtgagcagaggatccagccaaaatgtgccaggtatctgagcccagaagctgggccgtagcgaatctgtgttatcatgaggcccttagcacgtggtgactagttatgcagcaatcaataactaacacaggtcctcaaattttaaaaataaaaattttatgaaaacccctgagaacagttgccttcaaagaggctgggctatcccttccatagagggtctgctgaatgaccttggtaaaggggtttctagacttctgtactctgatgtcatttccaaaacattgaggcaagagataaaaagaggagaaagcggccattaaggcttgtaaattttagccagcatcccaatttaaacaaaaagtcacacactacgacatctaagacggcaaacctatgctccaaaaagagaaaaaaagattgacaagccctgtattagtacaatttaaaaaatttttttaaatgtttaaaatatatatagtagatataagaataaattgacaatatcaacatcaggccttttggggggaaaaaaaagacaaagcagaaaatttcagtttggtcacaaaagtaacaatatactccatgtcagctttccccagcacactgcattccctggtgtggaattggttctctgataccattctccaccagacgataccagggctttttggagaacaatgtgtttgggtaagaaaaattccagataaccatacaacatcctgtttttatgagaaaacaaggaccatttcagagatgttagagggaccaaatgaaaaagctgtgtaaaagggactccccggccaaagtgtcacaacctgagctacagatattaataaaatcatttttttaaaagtcaacaatgatttcagctggaatccagtgactctggaaaatgccacgtgtacacgatgacattcaagggacaaatagcaaagtgtgatagaacagctcgtgcccagcccgcaagcagcaggcagctgacaatttagaaaacaaatttgtggcccgagacacctagacatgtgatgataaatgatgtgtgggggttgtgactggaccccgctccgtgtcagaaacaccagaatacagttgataaaaccagaggcaggaaaacagactttctagaatttcagaagctggaagcagaaacaccgttcaaggacagcagagctctacctttgctttctttcccaagatgaggtcaacgccttgctactaatgagtttagttcaggaatgaggtttttgttaacattcccttaaggagaaggctctccactgtacgtgaaaattcttcgggaacgctgagttgtgagcatggaagattgtcacgcagcaaataccatttggcacggccctgctctgggaagacagggacaccgtaggtgggcatccctgggaaatcagagagacaagaaaacgctgtactgcgctgtgccagccgcagaagccctgtgtaaaaccccacctggaagaaattaataagtgtctgtttttaagatcctatttctggtttgaaatcgacaagatgatgttggcgggaagagtctaaaataggcaaaaggttagagttcctgactccttctcctaatctctccttaccggtgctaatgctggaatctccaggtgacaaaatctgtgcacgactggcaagaatgtcgggaaggggggcatttcctaagctgcaaaggtgtgacaaagaggaacggctctgcaaactcagtgaccaggtcattacccatccaaaccaggacaccgttcagagtgacaagcaatcactaataaacacctggaaaacaggcttcaggcagggctatcttagagaaacggggaccatgttcattacgattatgaaagctttgagctccctgaggccagcaatccttcctgatttatctttgtgttcctggtgaagagcttgtggtacgtgtttcattaacatttgttctattaaaagttgaattaaaattattatcaaagacagttaaacattcatgcttttgtctttttcaatttttattctggcatattcttaccaagctgtgtattttataaattatacactattctacttgtttttatgcatgataattttctgtgaacaatcaagtaaagattgtatactagacacatctgattcagagtgctctgaacaatactagcattgttttatttttctatttcaccatatttaatgtgaaactcactgaaagctttaactgcttatcttgtacctaagagaataatcatctcccttgtgaaaacagtctttatttgagaacacaatatcttcagcattcatactatttcccaagatcccaattagaactcttgaatagtctgtctatggcgtaagagttatctttttacacataggtttgtatttgtctttgagctgatttgaaatacagttggagaaatacaattattaacaaggaaaagacaacatcaaatgcctaatcgagcagcaatgtggtttaagtatgtcacatgacaatacatattcacatcgcaatgaaaagacaggccatttgttcttttgatctataggactatggtagatgatagctccactagagaagctcaccactgacataagccatctagaataatctaggatgccgtgactttcaggggtgcctccctcatcacttacctcgacagcttggcctctcatctcctatgttccacgtcccattggcctggcaccgcaggagcctccagccttctaagtagtaaccaggactgcagctcagcaatacttgagcaccgtactcattcaaggatcctgaaaccagcctccagatgacatgttctgagagctgagcttcaatgctggggcaagcgaccgctggaagggaaacgtacatcacatcatcatttttcttttttggaaaacatcagaccgtgcttgctttggatggcaaggtcttgctatatgaaactgatcttgtttggcaaagttgatgccattacgtattatctcagtgtttctctaccacccacatagacatatgggaatgatcccatatgtaaaatgcattcaattgcctcactacagatgtcctgggaagtctgcagtcagactgaactgtaaagggggtaaatcacttccacaaaagtatatggctcattgaagttgatgaaaattttcatgagggtaatgagcatatgcaaataaaaatcttacatataatttccctcaatatccttggaggaacttggaatagtaattgtgtaattgcaaaccagctgggacactaattttcagaaactcagatgccctcatttcttcaaacctatgaaacacacatatataatatatctatatatcattgaatgtagaaacacacagaaatacataggcatactgcactaatactgtttccaaaaatgtttaacaagtcttaaaggagaccatctattcatgtccttagaaaagggcctagaatatagcagttacttaagaaagagtagtagcaattgtaatagtgacagcaacagtagtagcagtagtagtatactattaccagggtggacttcaaggactttctaaatatactgaaaatatatacagagtctgagttgtatgtgggtacatattctttgaaaagtgcaagatgatttaaaatacattacacaaaattagaaaccagaaccatttctctaattacgaagatttagtagctatcattcattaaaatcaaccaccaagaaaattgatcaaattgattaatttattgagctgggaagaattaactggagagactatagctattttcagaatcatagtgttatattttaaattctttttttgtgtgtgtgacaaagtctcgctctctgtctcccaggctgccaggctggagggcagtggcatgatcacggctcactgcaaactctacctcccgggttcaagcgattctcctgcctcagcctcccaagttgctgggactatggggatacagatgtccaccaccatgcccagctaatttttgtatttttagtagaaatggggtttcaccacgtgggccaggctgctcttgaactcctgacctcaagcgatccacccaccttggcctcccaaagtgctgggattacaggaatcagccactacaccaagcctatattcaaattctatacaagtttattagaattgagtcaggcataaccaaaattttacaaaaatcttgattagtcttttctcagtaatttccaagtactatataaaaatatacagaaaaatgtggctctttttgatatcatcacaacagtaacaatgaagtctaaaatgggaagaaaaattgctaatttaaaagtaatccttaggtttctttctctcaagtatttttttaggttgaaggaattattctaaatttataagaagattcaaatgtttaacctaatgataaaaataatatttttctccagccaaaatactcttacaatttctagcaaaactgtttctgaaaagcccttaaaggcttttagcctcataaatttataactcaacttgaatctgactgcatatttcaaataaaatgcatttaatttcaccaaaaacatgcaccgcatgttctcactcataggtgggaattgaacaacaagatcacatggacacaggaaggggaacatcacactctggggactgttgtggggtggggggagggtggagggctagcactaggagatatacctaatgctaaatgatgagttaatgggtgcagcacaccagcatggcacatgtatacatgtgtaacaaacctgcacgttgtgcacatgtaccctaaaacttaaagtctaacaataataaaaaaaaattatttttaataacttgaactatcttttacaaactttatttctgccaagaatgactcaactttgttctttctttctttctttgttgtttccttgttgttttatacagactaggtctagttatatggcccacgctggtcctgaagtcttgggtcaagtgatcctcatgctcagcctcccaaagtgctgggattacaggtatgagccgctgcacccagccaaaaattccaatttggttcacacaacggaatcagacaattttttgagctgataccatctacagtatcaatttccaagttcttcatgatgatctctttcttcatgaaaatggtatttggtttggtttgtaattatcttaggctagtttgattatttgctcacatctctcttttttttttttggctatgctataccctcatttattgtaaacactgtctttttacatttttttagtatagtgactgacaaattagacactatatgtgtgtatgtgtgtgtatatatatatatatacacataatataattatatgtgtgtatgctttgaaaaatagcctgccaagaaaatacattgccacaacaaaagaaagagaggaaagaaacgtgtatgagtggaaattaggagtaaaaagaaaagtgaggactgcaataaatattaatattaaagtccatcttgtcctttgttaactgaaggatgagagtggaagagtggagatttccagaaatttgtgcaaattatcattttatttaatattttttaagaatgataggtagagaacatacaaaaaaaactgagtttgaatactctgtgacgtaatttgggaggagaaatcccaaataatataaaccaagaggatgccagaccattttccctaaagagtggtagaaaaggtacagtctttgtcagttgtgtctccatgcacccctgcgttcatacaaaaacagtgccaacagcccccacggaatggtgggccctgatttgctgtggtcaataaggctgtcccaaagaatgtcctttatcttggtccaataaaataatgtggcaaaaatctgataacagaactgtgactctcgcgagagggtactgaattcaaataaaaacagaacattttacaacccccaaacacctaccccagtctactgattcacatgcctgtacgtggtttctagtcactgacatcagaagcctgaaaacagtgtcttcctgcagtccctgtcacatacactctcacaaaggtgtctacactcaacccccccaactccctatgttttctcctcttctgtgcatcctcaacctctaccttacttcagagtcaaatgcttagttttggcgcaaaatttcacttgcacacccttaaaagaatatttttaaaaaacactgatctctttatatacccttcattaaaaatttaaaattttcctcataagtttaagtcattgacattaccagtatatgaaatgcaaattatggtaaaagtgccattaaataaaataccacttttactcaagtccaagagaataataccacggcaacttgacacttctgaatattcatttaaaagaaattcaacaaatttatttcattccttgttctcttccaactattaattctaggctacagtttctataaaaaaaatttaaagatattttattttgaaagttctttatgaataatctataacacttaactgtaccaaacttcgatttttaaatttcctgtgaccacacattttcacagtgaaaacattctctttgatttagatgcaaatttcctattaatataccattgattgaataaacaatatgataaaattgttgataatctacattcaacacaaaagtaatgttttattggtaagacaccaattgatgctacagataaagcattgttgttcatgcactactgattgttagaaagagacaagctgtagtatcaattgtattgctattgtggacttcagacctcaagacaagtagtgttaaaataaatttggctcactgagaatgacggttaacacgggaacagaaaaccaaacaccgcgtgttctcatttataagtgggagttgaacaacgagaacacatggacacagggaggggaacatcacacaccagggcctgtcgggaggtaagggacaagaggagggagagcattaggacaaatacttaaaccacgcgggatttaaaacctagatgacaggttgacgggtgcagcaaaccaccatggcacatgtatacctatgtaacaaacctgtatgttctgcacatgattcccagaacttaaagtaaaataaaaataaaataaacttaaagtaaaataaaaataaataaacaaatttggcttcgagttacctttacaccttgaattcctacacagtgaactgcaacctcactcagtacacagcaaactgcaactcaactcaagaggatgtggttgtaacaaggagttgagtctcagctcatcacagcagccttgcttcagcccatcgcgggccccagactagtcagaccaccccctagtcgggcaggtgcccagacgtggctcctccagctgcctccccatgtgccttcctttttctatcagtgctgctgcccacattgctgggtggagctctctggaccttgcctggatttgaaggctgcctgattgatacacctatttactcaaataaactctgctaaatttcatgtgtcaaaagttttctcttaacaggtagaagaaaaatagttggaatgaagaaaaagatttgatgtggtttctggctgatgaaatcgcccatgcttttttgtccttttttaactgttttccatagtttccaggttttctatatattactaatggtcagagaaaaagccaaccaagagatcaaagggacttaggagtagtggcctgataggcacagacatcattttacagttaggctgaaaaactgaaagctgagaggactttatttgtttacaagaaaaactggaaatagttcaactaagtcccagtgaaaaaatcttctgtcttgaggtacaaatatatatgtatacaaacacacattacatatataaacacataaaaacacataaatatatgtacatatgtaatttatatgtatgtataaattttaatatatacctactacacataaatgcaaaaggttataaaaatcaatgcataatagtttaacaagggattatttaggaagactaggatgcttctgttatgttcttactttgttatttcttcccacaatatcatacttagagaggaaaaagtgaaaagagagtaaaaatatagtctatagggacattttcatttcatgacattaaacattatagactagggaataagataaaactgagaaatatagaggatggtagaatacatgaagctgaagttaagaactggagcaaaaatatgactcgaacatcacagaaggcaaagcgtgagccagcggcactgtggagaaagggaaggagggcctcggaaacggctttctactgagctctcatttctgcccagggatggccctaacactcaaaggcagttgcagtaaacatgcacgcctcccctaagacttaagacaaagtggagttacagtcaggaggcaacacgaaacagcctgagtacctctgtgctgacatttttaaagaaaacacttggttctttctaacaaaaatatcttagctagatctctcctaagatacagggctgttccctgtacctgccagcactccccagtcccccaccatcataggcagatactgcagagcgcggctgctcccagagacgcgcatctgtttaaaaagctcttttcacattgtgtatgtaattgtatatgtaattctactgtaagcggatcctcactcacaacgacactgagacagaaaaggagggtatcactattatttgtatttatttgcaagttacagaggagcaaggaagcccaggctcaccccaaccaagccagaatttccatctgtgggtctcacatcatgttgtgtttctgacttgtcactttccctgaacactagaaacaatacgggaaaatttgatttattctacaaatgactaaaatgagtaactccaagcatagtttcaggaattgaatcgacaagagctccaaacatactagcatacagatatcaaatgaataacaaactccttgaatgttttaaaattttggtcaacctgggaaaatgtagcaaaagaaagtgttttgctaatataaactttataaatcaatatttttaacaattataagtgaataaattgccaggtcaagttttgtaaaattaaatgttttcaaaaacataagggtttagctggcatgacagacattgttcaacttgccagtttaccttatatttcttcttttttatttttaaggaaatacaggctaccttctattaccttaaagaaaacaactataaaggaataattttcttcaattttcacaaattcaggagaacatttactggagatcatttcaaaatatttgacatggttaataccattgactatgttgatatggttgacacatttttgttctaaaaaccttaaattatgcttcccaaatccagatcagttgaaagtataaacaatatatagtcctgtgcataaaagacacattgccctgacttgtgagtgtttcagcaacaacacaaaatactttgcattttacttaagaaatatcagcctttaatttggccgtgagtaattctgatttattatagactcattcagccagtgacaggatagaagaataaacattgctttaagatatttagacaagggaagtgagattaccataaataaagccctttgcccttctctctcaaaaatttcagaaacttatcataaatcttctgtgatattctaatcagcccctagattctggatgcaattgttttgttttgctttgttttgtttcttaacagagaagtctcccctatcgtactcaatgtgggtaagtgcttcttataaccaactttaattgaagcacatttaatgagatttataaaattatgattagatgtcattggagtaaactgatttaatcagcctcataactgttcctcatacacacaactaaagcaaagtgtgcagtctagcactaaaaacctgtgcttactggacacgcgagagaaaaactggtgttagttctagtaccttagaagcctaaataacaagacaactttggtttgggtaaaaaataaatataaagtttttggggaaaactaggatactaagaccttttaaatgtgtttcataccatcgaatttcaacaatcctctcttaaaaaacccgtccaccaagacaaaatcaagaacatgggattcttttctttttggcttttagaaaattatttcaatagctttttggggtacaagcgtttttggttacatggataagttatctaggggtgatttctgggatttcagtgcacctgtcatccaagcagtgtgcactgtatccaatatgtagtcttttatccctcacccatcttcctatctatcatccccttgagtccccagagtccactgtatcattcttatgcatttgcatccctatagatgggctcccacttaaaagtgagaacataacgatatttggtcttccattcctgagttacttcacttagaataatggcctccagctccatccaagtccctgcacaagacattatttcattcctttttatggctgagcagtatttcatagtgcatatataccacactttcttttttttgtttttttgagacggagtctcgctctgtggcccaggctggagtgcagtggcgggatctcggctcactgcaagctccgcctcctgggttcacgccattctcctgcctcagcctcccgagtagctgggactacaggcgcccgccaccaagcccagctaatttttttttgtatttttagtagagatggggtttcaccgtgttagccagggtggtctggatcttctgacctcgtgatccgcccgcctcggcctccctataccgcactttctttatccactcattggttgatgggcactgtgtggatttcatatctttgctattgcaaactgtgctgctataaacatgggtgtgcatgtgtcttttccacagagtgacttctcttcttttgggtagatgccccgtagtagggctgctggagcggacggtaagaggatatgggattcttaaggacaaaagttgtttttggatttttgctttacccttacagcttaacgaaatgattcctaaatgagttatctagaataagagtagatgaccaattaatagagttttaaagttaacttctaggaagtaatttatgggctcacctgagagtgactagctttttagaaacattagacaaaaaggtctcaaggcattaagttctagcttcttcttccccaagatttccaactgaatctagaccttcataacactgtcatattcttagggtttcgaatcaccagacttttccttattcctgccactactgttttttccatttgtgaagcttctaaaaccttcagaaaatcgggcatctatatttctctggcccggctttcttattttttatactatggttattttaaaatacatatatttgagcagacttagatcctggaatatttaaataactaactatagccatgttaaataaatagtgttccaacgctatcggtagcctaaaggcaaaccagccatggaatctgatctcagcgagacaagaccaacactaaattcacctcatccagttagtgataccagcaaataggcctttgaagttttgcaactttattacctgagttcaatatcaaagctactttttaaatttcatgaaatgcctgatattttaattacataaaatgagtctaatccaacccctgggaaggattttgaaaaatagtatgactgatccaagcatagatttaaagtcaaaaatcttagtgttccattctttgacttgttgggcttaattgtaaaagcaatacacagcatttatattactggtggctctctttgaaaagattgtttccttatttacttctaaaacgttccttaaaatttttcttgtggttatttgttttgtttttatttacatgttataaggtttcacatgttgcctgcttttcgaggtcatggttttaccatgcactgcatataacgctgaactgggtattagacaattcctcaaattaagaatatccttagagctctttgctgaaaaaaaaattcgcttaagtattctttcctaattgccctaattataaaattttttcttacaatattttaaataagaatatatccacatactcaagcgtaatttgttgattatgatgaagacgaccttaaaccttaatgctattacggatttggcacagttagtgccatgagaacccagccagagccacatagaggcttaaacttcatcatggagacaagccataaaaaccagcagttggcatctgagctggtgactatatagattaggtaaactgataagaaattctacaagaatagatggcgacaagcagactaggtcaactcttgagtactttggatcttcgcagaagagatctagacagaaagtaacccaggcagcagagtgggagcaaagggtacttagagaaagtgggtggttggccattgctgtaaacaccgtgtgagtgaggcagacacaggaagctgaattacaagaaggtatattcctagattcctgcagagtgaagggtcctgaattttcaacttctagccttctcagcccgcaaaatctgactcccgtgcctgaaaccatttcttgacccttccttccttcttttccttacttccttcctctctccctcccttccttcttttcctttctttcttcctttccgccttccttccttcctcctttactttcctttcttccttccttccttcccccttcccttccttccttctctccctccctcccttccttcctccctcctttcttcctttcctccttccttcccattccttcctttcctccttccttctttcaattcttccttctttcccttcctccctccttcgttccttccttctttccttccttcctttcctccttattttcttcctcatacattatgacaataaacttccaccacttgtactaacctgaggaggcattttgcacttcttgagattataagccctaaatgacctcgtctgcattttacaacctttaagaaatgtgggttcagaaaggcatttcacaggcctaaggtctttcaaaatattttcctgtctatagcaacttgagttacagcacggccttaaaacccagagattagacttaatttaaggagattgcgtttaaaaattaagctcgtttagcactgatacatgctttgccaaatatcagcattcatattagatttgccgtccccaatatcaaaccaaacgtgttcctcttctaaaaattaatctggctttaataaacatagtcatagcacggaattctcttaaaagaagggtagtttccaagcaggtttcactgagaatccagaaagtgactccaacctcagagatgtccttagaccactgaggggtgaaaaggagtctcctatggattggtccagaaggctctcctctctctcacctctacttttcctcctccaatttcagagtgagaagtcaggctctagaatttggagaagatggaaagattgaaagaaggaacgaacatccaaactttatgttctgtttatttcctcatttctaatatcaccaccaaaatgttaatgcagccaaacactcccatcaaaaatattaacttcacctggctactattaagtaatatatagcttggagaagctttagtttctcaaatggattttaactcttattgagtgaaagggaaaatcaaggtgtagatagcatatacacattgaaatatatatatatatatatatatatataacagaaatatatatatgtatatacaaaatgattacaaattgaaatctatctatctatatatataaacatataaacatatatatgtatatacaaaatgataacaaattgggccgggcacggtggctcatgcctgtaatcccagcactttgggaggacgaggcaggtggatcacgaggtcaggagttcaggaccagcctggccaacatgatgaaaccccgtctctactaaaaatacaaaaattagccgggcatggcggcgtgtgcctgtaatcccagccactcgggaggctgaggcaaaagaatcgcttgaacccgagagacagaggttagagcgagttgagatcgtgccactgcactccagcctgggtggcagagtgagactccagctcaaaataataataataagattataaattaatagatgatttgaatgttttgtcgaaaataatctgttagaatatttctgagtaatattttcatataaaacatttaatggaaattgtttgcagcatcatgaacattttaaaacgtgttgaatgtttctacagaagttccagtgtcatatttctgtttccttttctctgcctaatattgcaaagcatttttcttcatatcggtaaataaattatcaatatttctgtacaagaaataataattttcttaaccaacatgaaaatggctgagcagaacttaaaaatattagagagctcctgacaattttgaattacatgaaattgatgtcattcaacatttttggacttaataaaaaggaaattttacagggttaaagcaaataatttagaaaattctcaaatattattttaacagttaaatagatatgtactacagagcaaaaatatatcccgtaaaatgcattttttcttgttttctttacagcattatattaatatagaacaagcaaattcttctattttatatgtattacttgttctctgatcccaaacataaagaatcccaggtaatatcataaatatgcttgaaaaggcgctaacatgaaaatacacaccttgaaaacctttttctagcaacatttaaattttttctaggcgtaatattatccatagcatcaggttatttctttttcttttgaaatgtcaatgtaagtgttggctgtgtagaaatatttttggttgttacatgcttgtagcatttcaaagaaaacagcaccacatctatctgtagaaatgtgaattttaaaaactcatacatagatagaaatgtgtgctaatattcccatctttactcaagtatacatttagaactgttaaatgaaagatgaggatgccaatccactgctattttataaaccgataaacttcatagttcaacacagcacagcgtttttgccagcctgtcacagcttctttctggcagccatcaaatggcggtaaaccccatgtagccgacagtctgtgggtgtaaagtgctttaaagcagtacagtacaatcacgcaaacgttatgctcatttctaaaatgtcttttgacatcacggtcctcttggtttcagaatatgttagtgattattggccacccttcatctctgggaaacatcagctctggaaggcacagaagccttaacaactttgtgcgggctcccatgccactgggaacccaagcctccctcatcatcacacaatggtttccagcacctgccaactctgttcccaagccacccaggcaggagggtgatggggacaattctccaggggtctctcatgcatctggttagctgagataccaaactgactttttggcctgaactatttcttccaagcatgtagcaaacagccttggaagagagaggtggatggatatgcaccctcctatctagcacagagactcgtgcatctccttagctaaggtaccaaactgaccttttggcctgaattatttcttccaagcaggtagcaaacagcctcagaagagagaggtggatatgtacctcctatctagcacagagacatttccttttatcaccttaataggtattttctaaatgtatttatcatctgcacatgatgatgatgcatttagatgaggtggggatgggacctttgtttgactttgtaaacctgcttacgggaatcccgtcgaagcacagctgaaagcgggacgggcactttacgctagttccacatgggtaaccctgtggatgagcataaaaggaccatcttcagtgctgactccatcatggagcaaccgagcaaccttgggaaaggtactcaagctcccatgtatactctgggcatgatagcagtacttcataggtttgttataagagctcagagatttaactcgtgtaaaatgattaaaacagtgcctggtgctcatagacataaccttagtttttctacattgagttatttatatttataggtcgtataaacctagtgctagatatgacctagtactgcaggattatacgtacacagagtactatagtgaatatagtatatggaaacctacagtacaaggtcactatggtgatatatatatagtatatatagtgatatacatatagtgatatatacagattatatagtaccataggtcactatagcgataggtttctatgacctataaatactagatatgacctagtactgtgggattatatgtatatatagtactataatgcatatagtacatgtaaacctacagtactaggtcactatggtgatatatatatagtacatatatatagtgatatacatatagcgatatatacagattatatagtaccataggtcactatagcgataggtttctatgacctataaatactagatatgacctagtactgtaggattatatgtacatatagtactatagcgaatatagtacatgtaaacctacagtactaggtcactatggtgatatatatagtatataaagtgatatacatataacgatatatacagattatatagtaccataggtcactatagcgataggtttctatgacctataaatactagatatgactagatggaactggtgatataaacctatcactagatatgagtatcaagctagtattgctctggtttgctttcccttttttatgatgtatataaattgcatttaatcatgtaaagtcctcatggtgcccagcatagagtaggtccacataaataaattgttaatgactgctttgcttcactgactagtagtagttttagctaaagaaacaatacccacatattgtgattagaacttaggggtttttttcatgcaaaaatcacacatttattaaacatattattaactgaaaaacaacataccagtttattttcaagtgctcttcatccaacaccttggacaaaaccgtcagctcaaagtgaattcaaaaaacacattataaggcaaacagtgacaagaggtatggacaggcactaccaaaaaaatgcaatttgttctctaattaaataatgtcattctcaagtgatatagagctgtcatcttgacagaattccttttttgtataaatattcataaataaaaatgtctccacatattggaaagagctgcaaacactctacaacagcagcttaatgtctacttcaggggaaaaaaaagcactaaaatcctcttccattgcaagctgtttatttctctggtgtaccacagctaaagatgagttatgatagcagcttgatgttgattatgttatattcttttaatcaaaaaggaaacacttataatattctaagtatctttagcccaaataccatgtcatagtgagcatttgtaaataaccagactgtactgtccttcatatgtgaagctgacactactgatgtgtcaatcaatgccaaatgttgggtaaagcatttaatttttatttatttattttcttgttgcatgaaaaggtgattgcattctaacttttgtgacctaccacatttaagatgtgtatacgttgttctttactttgtcccagaaaagacattttaatcctgtagtgactttgctcacttacaccagagaaataaacaatttagtttttcactggaaggctagcttaatggttttgttttctcctaaatacacagtatatgatacacatctttcatcattttgtcagactgttaaacccagtccgttaataccaatagccctcacttctttcatcatgtcattagcatgaatcgtgtcttcgatgatccaaatccagtctcagtaaataactgaaatgaaaaaaaaaagggacctcaaacatctgcctcggagatctgcaccactgcaagaaggcggcaaatggaagcataattccttattataaccttcattttactaaaaacctgagggtgaaacgaactaattgtatttaccatttgcatttactatttatcaaagctgaagtatttatctcttgagattcagtgtactgatctacatattactgcaattgctaaagaaacttaaaaactgtttcataccatcatatcatacaaaggaatgagccctggggaaatacatacttggacatttaatggtaaccaaatttttctggctaagaggtaaagttttatgcttactctgccagattttttccatttaaattaagtgaacaaaaacaatcccccgaataaaaattaaatcggttttccagcccttgaataccaaggaattttaacaaaacagccacatctcttttttacaaactttaaagaacgacgggaggaaatgcttacttgaaagtttcagatgatgcttagaaaatgttaacatggatttccattttattataaacgttacatttatttcctcatgttactgaacatatcatagttggtatcaaaagagtactcacgatgcaaattgactttttgctgtttaacaaccatttaatggaacctgcaataacttctttacaatgagaagcaattttgttaattgttgtcattgtaacttctttaaagcaattgtacatctagatatgtattttaaaacaaaaaaaaataggtataagtgaagctaccttaagccctgtcatatgttttacataggcacaaaaccgttctattgattgatacatttacctgtgaactgcaagagaccccttattcctgatttttccagaagattttagagaaaattaggccttgtccttaaagccactggtctattacctatggtgaccccatcacctacttaatacttctcagaataaaccacatgcaatgttaaagtggcacctgtttcctgcttgtgttctcagttttataatgcatcagatttaaaaatcatgagagctagtaagttcctagaagcaatatatcctagaaattaggaagacagattctcttctccgattttctggactttgctacttactgtatccatgaccttcaccaaattactcaactcatgccttcttttggttttcctctatacaatatggtgataatgaaattacatacctcataataattaagtaaattaacttgtgtaaagctattggaagcaagagtggaagacagtagggggtatagggttagttttaagctagtaattaccaatatggtgtgtagccctacttatgcacacagggactcacacacgatgtgggtggggctccaagtcggcctctttatcatacctgacttttacttttggagaaaggagctcaaaataaagagaagtttgtgaattttcttctaccgccatggaactctcaggagtttttctgcagaggagtgtcctcttttgattgctatgctcacaaagtcagtctggctgttgtttggagacacaagggaagcggaggtgaggcagcgggggtttcaggcgctcaggtggtgacctgggtggtgcagaagtgaagccacgtggacgcatgtgtttcagaggcagggcttggtgagggaatgagtgtgagagcaagaaaggagctaagggttacaggagatacctgtacgcctcctccggttccttccaccctacagtgtgtagctgggaatgtcctaaggctccaaaccaggcttctgcccaccttcttcacctctgcttctttttattcccttccgtggacatttcagagctaacagtgcgctcaaatcatgtctcctgatcctcgcccccacggatcatgaaaccaggtgaatactgaactatctctatgtacaggctgctggaatggacagagccttgaattctccctccaccacggtacagtgtacccccaggcaggccttggcagcgttacacaattgctgccttttcctgatgcccaaagcaccggtgtctaatcaaatcatttccaggcagccttccccgcagcagctgaagacttccaacacttccctagaggtttctgtgatgcccagccacatctgtgtgctcacatatggcaaattctttgatacctcaagttattttctttgtattaaaccactaagataaggaacataatatcttcttcctaggattgctattctaattgaatcacgtagcttagataaatgtctagagtgactcttcaaagagccgctctgggccaggcgcagtggctgatgccggcactttgggaggccgaggcgggtgaatcatgaagtcaggagtttgagaccagcctggccaacatggtgaaaccctgtctcttctaaaaatacaaaaattagctgggtgtggtggcgggtgcctgtaatcccagctagtcaggagactgaggcaggagaatcacttgaacccaggagggggaggttgcagtggaccaagatccagatcacaccactgcacttcagcccaggcaacagtataagactccctctcaaaaaaaaaaaaaaaaaaaaaaaaagagttgctctgattttcctcctattttgccaggccaagttctcgccccagccatctcttctgtagaaattggtcccagacgattcccgtgttccttcatctacatccgttattcttttccgctgctgtttgcatccggccttctgtttcatgtcctgtgcatatcttcaggctctaagggcaggagatatcacttaccagtctcacaccagtagttacaagcctgatgccccattcagagcacacgctccaggacgctcagtgaggggttgcgagtacacagctcctgcctgtaccaataatgtctctgcctcgctgtgcccatggaactcaccatctcacatgctgtcctgatggaatccagggcactttgtttgctcccgtcttttcgaaactctctgcttctcccttcctttacccccaaccaacgacttaaaacctacattgtgtttcttttcctcataattttcacatagttggctctttatttcagggttatgtaatgccaatcccttttttggcagatataaactacttgcatggacattctagagaccagcttgcaatgcagaggaaaacacttgagtgtgtctaattcctcaacccagctatgtgtggcctttacacagaaatatggctcatagggacataaaaagtagtttctgtttatgccgtgaaggcattctgttctggatgtattcacaaacacctcaacttgacggtgatagactgaaggttcttgttcattttgtcaatctgtgaagtaacaggcacatgtgcgagaaatccttaaagaaatctaagggtaacacatcattgcttacaataaaatttcactgagatgatgtatctgtgatacccaaagagctgaattattttcaggtaaaacaatttctatttagctttaaatgtaatgaaagtacccatgtcagtcaggacactgacctaaaatcaaataggtcagtataaatattcgcgaccaacaagaccgatcttgtaggaaactgggagatgttattttaattaattttacaaattaccaaattatattaaatacattttgaaaaaaagtgtccgatacatcatattctgtcgtagccaaataaaacggaggtaagaagacattatgttactggcaaaaaagtagacaaatgtgtcaatggaacagaatacagagcccagaaataaacccacataaatctagtcaatgaacttcgagcagaagagcaaacacaacccaagagagtaaagataatcttttcaataaatggtgctggaaaaactggatatctacattctaaaaaataatccagacacagaccttttgcccttcagaaaaattaatccattatgtatcacacacccacatataaagttcaaaaatataaactcctagaagataacataggagaaaattgtggtgcccttgggtttggtaatgactttgtagatacaaaaacagaggcaggatgcattttaaaaagaacagatatgttgaacttcattaaaattaaagtcctcagctctgcagaagacactattaagaaaatgaaaagaccagccacagactaggaaaaaagggtttgcaaaagacatatgggataaagaactggtatctaaactatataaagaactcttaaaaaaaaaaaaaggaagttaacaacctggctaaaaatgggcaaaaggcctgaacagacacctcatgaaaaaagacaaacagatggcaactgagcatatgaaaagatgctgcacatcatgcatcatcagagtattgctaattaaagcaataataagatactactgcacatctatgagaatggccaaaatccagacactgatagcaccagatgctcgcgacaacgtggggcaacaggaactctcactcattgctggtgggaatgcaaaatcctgcagtcttctttgaagatagtctgatggtttcttaaaaaactaaaaatactcttaccattcactctatcaatctcaaccttcggtatttactcaaatatgttaaaaacttatgtctgtataaaaaccttgcacacagatgtttatagcagctttattcacaattgtaaaacttggaagcaacccagatgttgtctgtacgtaaacgggtaaataagccatggtccatacagacaatggaatattgttcagtactaaaaagaaatgagagctagagccatgcaaaatcatggaggaaacttaaacgcttattactaagtgaaagaagccaatctgaaaggctaggtgccagatgattcccaatatatgacattctagtaaaggtaaaactatggagatgaaagatcaaggtcagtgtttgtcaggggttggatgcaggaaggcgtgaatgggtggagcacaggagactttaagggccacaaaagtcactttaggcgtgaatgggtgggcaaaggagactttaagtgtgatactatcatggtggatccctgtcattacacatttgtccaagcccacagatggtgcaacaccaaaaatgagctctcatgtgaacgctgggctctgggtgatgatggtatgtcaatgtaggtgcatccattgtaacatgcaccccactctggtgtgaggtgttgatagtggggaggtatgcacatgttgcggacggtgtgttttatgggaaatctctgtgtcttccattcaattttgctgtgaacctaaaactactctcgagaacaacgtctgtcaaacaaagaaacgaaagctctgaaaataaaaattacattttataaagtgaccttgtcatttagcaagtctttctcagatagtatacaaatttaaagtgggttttcctttaaaacatggcatatacttgacattttatgcataacacctagagaacttaaaaaaaaaaaaaaaactgatgattggtctccacctaagaccagttgcctcagaatccctaagggtcaaaactggacattaacatttactttaaatctctctagagtatttcagtgcatacccagtagagaaccactggcattataaaaggggtataggatttagaacaagagggagtagaattccaacttcaaatctgcaaattagtagttttcacctcatttgtgtcccagtttttcagggtttttatgagttttgtagataagctatttgaaatatttggcaggaaatacagactttaaaaatggaggcatcattatgaatgacctccaggctgtgtgcaaaagaaacattgtccataaatgtctgggacattgttcttattaaaatcaaccccaaacatatacatattgccatctgttaagttcctattttgagagaatagttctgtttaggactgaactcaaaaaacataccaatgtatcttgctatcctagcctcccatactattacttaattgcaataaaatagtaccgtcttaaatagaaaataaccaagaaatactaatgttgattcaatattgtctgactctcaggaaatgcaataaaaatgatgaaataaagaaaaataaaagcttttgggaagaactcaaccgccttccataattgtttgtctatttatatctaagtatatggatataagttagtttaaaatttttaacatgaccaaaatactgtagacaaaaagaagccaatgatctgactttattattgaagactatgtgaatccttctgctagtatcactggcgcaaaaatatcattgtaaataagtaaaaaaatagcagatactggtgaggcagtggagaaaagggaacacttgcatgctgctggtgggagtgtaaattagttcagccattgtggaaagcagtgtggtgatttctcaaagaacttaaaatagaatgctcattcaacccagcaatcccattactgggtatatacccaaaggaatataaattgttctaccataaagacacatgcacatgtatgttcactgcagcgctattcacaatagcaaagatatggaatcaacccaaatgcccatcagtggtagactgcatacagcaaatgtgatgcatacacatcatggaatactatgcagccataaaaacagtgagatcatgtcctttacaacatggatggagctggaggtcattattccaagtgaactaatgcaggaacagaaaaccaaatagcacattttctctcctgtaagtgggagctaaacattgagtccacacagacataaagaaggcagcaacagacactggggcctatgggagggtggagggtgggaggaaggtaaggattcaaagactgtctcttgggtactatggttattacctggctgaggaaactatctccacaccaaacccctgtgacacgtagttcacctatataacaaacttgcacatgtatccctgaacctaaaataaagtttttttttaaaggagatcattctatatgtactgacatgtaaagacatacatgatatattaaatgaaaaagattatagaaccataaaaattcattgtctatacagaaatgttatatagtttttaacttagaaaaattgggaagttacattatttccaatttgagtctagttttaatatacctgcaatgaaaatcttgctgtagaaatttagtgtgtatgtgagtggaactattcttctggtgggttttgcataacagactattattccataagactagagtttcagaaagtactccaatttgttactcttttaagattattactatagactgtaaatagctttctcgaaaacttaccccacttcacaaatcaaattaatgctttatttactgagcatcgatgtgttatgcagagcaggtgatacacaaataaatgaggcactgcttttgacttcaaagaacttaaaattatatggaagataaataggaaagattgtgttacattatgttttaacatcttgagtacagtcttattgcagggcttaatgtctcaatttcctctagatttcatccctccagattgaaaatggcagcacagaataggatgtgatgtgcaaattacatcgtgtctatactgtctatatttaggattcacctaacattcaagagtgcatagctcattctaaatggctgaaaatattttatatgaaatacattggttttaatattgctatgatgaaagacaccaaatcctcacaaggtgtgggagaggacctctgaacgtgggaacccggacttctcccgaaagcattcagttcccacctaaacccacaaagatgggcagatgcccctgaacacttacgcttacacgtgggcggcttccccttgttactccacaacccatcttcttgacacacggctgttgcttgctggctggattcaagcttgaagccctcatgacattcatagaccactttactgtccaaagtgaactcgttcccggtaaatgaaccgtttcctggggattctgggattccacaggacacagctgaaaagaaatgaaacaaatgtaggcttattcttacagaaattattttccagctattaaaaccattgattgattaatcattattattgactccatttttcattaaaattgtgaattatatttctttttttttctttcttttttttttctggagacaagagttttgtgctgtctcccaggctggagtgcaatgactcgatctcagctcactgcagcctccacctcttgggttcaagtgatcaagtgattctcatgcctcagcttcccaagcagctgagattacaggtgcacaccaccatgctggctaattctctatttttagtacagactatttatgttggccaggctggttgccaactcccaaactcaggtgatccgtccaccttagcctcccaaagtgctgggattacaggcgtgagccaccatgcccagcatgaattctatttctagggtatgggataagtatacacattttcaaaatcttaagtatattaaaggttaaatgaggaacaatggaaaatgggtcagaataaaagctcttcataattatttttctggaagataagactgaccactctcatgcagcttagccgcagtctgacatattttatcagagggtgtggccacgggagcacaatgtcacacactcaacttcatctcatattggaaagaaagaagaagggatgaagcagcatctttatcatcacaatgcttattgcagtgtagactctttggtgtcgaaattcctaagaatcagccgcctcagctctgaaaagtcttccctttttattgttcctctccccttccccaattcattttccctaaagccccaggaagttctgttacaagaaaacacgacataaggaattgatagaggaggcactcggggaagattcccagggcagaaggcagcatctagtggggatgtggaccgctttcacgggaaagaccatgcaagaaagaggtatgcatgcagatgaggttttataaaaaacaagatttggggagaattctgtgtaaaccctttcttcttaaatttgctatgtctgatccagatgtatctactatgggacaagaaaaaaattctcaaacgattacatgtgacagtcatgaagccaacaagcaggcagagggtgacatttcaataatcacgtacccacttcagctgcactcataaaagaaaagttctatggtaactaaataaagagccttcttttactcaatcagtattaaagatattgttcacaccatggatttaaattcagatagttcaaatttttcccatgtagattctaatgagaatatctgtgtaacaagatagagcgggaagggctggatgaagaaatgtatataaacacataattctacatataaagaaaatgactaacctaaggtgacacaatgacttagtaacctctggccagagagcaaatcttatgactcccaaacgagactattctctcttctgcaaaagcacaggttatctccggtattgttggagttccttggtttgctgtattggttctttcttctttaccaaaatattaaataaatacaatgggaaattgccagagaagtaaaagaaaatgtattccccaataaaatccaaactcctggaaatttcaagctctaaaatgtctcatgtttaaatggatgatcaggtactgcaaccatcaaaaatacatgtgggccgggcacagtggctcatgcctgtaatcccagcactttgggaggctgaggcgggaggattgcttgagtccaggagttctacattagcctgggcaacatggtgaaaccctgtctctaccaaaaatacaaaaattaggcagatgtggtggcacacacctgttgtcccagctactcaggaggctgaggtggatggactgcttaagcccaggagacagaggttgcagtgagctgaaattatgccagtgcactccagactgggtgatagagcaaggccctgtctcaaaaacaaacaaaaaacacatgcgtgtgtgtgtgtgcacatgcatatttacatgtgtgtacatgtgtccatgtgcgcacgtgtgtacgtgtgtgtacatgtgtgtagtacatgtgtgtatggcatactacaataatccatttgcagtagaaggaaaacgaaaaaccacagacataaaggcatcatttggggcaaagcatttcaaataataaataatcatctttggctctgtggaagcaacagatctgtgggaagactgttggcatgtggaaaatattcatcttaatttcctgaatgcagtaaatgccagagacccatcctttcttttctgtatctcacaatgttccaatatctagcttcctcatcattttctctcagatttcactctgaaaatcacgtgttcatgatcgcaagccttaatttttctcccactcgctggctggaatgtgcgcagtgttcagcttccttaaaattctcatttgggcagagcagggaaagaaatgacatttttctatcggacgaaatgggaaagatgacattctacaaacacagatgaagccccatcacaaaacaattcatactcgggagaccaaagcagaagatctttatagccccttctgttacatctggatgcttatttgagaagtgaacccctgcttgcccaggtcttaagacaacccattttatgttgcctgatcaacaaccgggaatctttttatggttttgaaccacagtgtttagccccttaagcgtcttaacaaaaggctatttggtagatttaaaataacggttggcaatgggtcaaaagtagaattataacacttctgatttaatggagacacagcataatccttatggactaaaatcaggctcatgggatgaagacagtttcctgctcaagtttagtattcattcatctctcatttattcccaaaattttgcatgattgctataggataggcatccatagatcactatttttttaaaaatgcgaattagcattggcaatgtaagaaactttcacagtttggagaatttccttacatttggtatatccaaagagagtaaaattcctcagttgttttttctttagttgtactaaggtattattatatgtcccagcagcttaggcgaataatcatttattgatcctgtaaagttaaattttgtttgggagcacaggcctcaaactcagacttctgagtcagttcttgctgtacctctcaataacagtgtggcttcagctaacttacttaatgaacgttgtcttcttacgctcaggttattaagacctatgtcaaaaggtaatcaggagggttcaatgaaatcatccttacaaaatgcgagccctctgtccacacgacataggcattcaatcaatgacaaattattatacgcagaaaatctaataattatgttataggcagaatatgttttgtattacacatacacacataaaatttttacttatttatttgcaaataaaaatattagttgcaaggattaactctctgttatctacttattaaagagagcaaagagtaagttggtaggtagtaagatggcttacttcacttacatatctcatgagaggtgtaacagtttgatttcaaaaaagtaagtagaagagacgtccagtgttgtctgaacctttaataccacaaaccccacatgggatttcttctttggatatctaagatccttcaaatagtggttaactttgtttccgcaggcttaaaacgtttctctgtttttttctttttttctttttgagacaaggtctcgctgtcactcaggctgcagtgcagtggcacagtccaggttcactgcagcctcaatctcctgaactcaacccatcctctcacctcagcatccccagtagctggggactacaggcccaggccaccacgcctggctattttttgtatttttttggagagactgagtcccactatgttacccagaatggtcttgaactcctgggctcaagccatcctcctgcctcagcctcccaaagtgctgggattacaagcatgagccactgtgcctggccagcctgaggatttctgaggatttttaagtatttccaatgtaagaattttttattaaagatacgtatttatatgaatatgtatatataactttaaatatgtatacacatatgaatgttaggattttcaagtatttccaaagtatttaagaattttttattaaaattatatatgtatatagaagtataaatatatgtacacatataaatgctaatcaaaattgtaatataagaatattctagattactatctacataggttgtactatacaatattagtgcctgccatttgtttttgagtttatgttcatgttgggccaagaaataacagttaattttttgcagcctaaagagaaaaatattagagacagataatggagaaatcatgggtttgcttcaagagaagaataagtgactatacagaaacttccacaaatataagccatataatgcttatatggtaagaaatgttgaaaagatggactcattttacacgcaaacacacacacacgtggtaaatacctatgagtatcatatataatttttcaagtaataattgaatttcataaaaacatcatcatcttaatggttattttcctcaatttgaattgtgtaagttaaatatgcatttaacttgcaaatacaaatatgcacgcaaaacattatgtttgtatatatttagtaagattataatcaaataattaaattcaaaatcagggtcattaaaacaccttaggaaacactaacttaagggaatcatcaactatatgtgtatttgcaggtatgtgtgtgtgtttgtgtatatatatatgtatacacacttatagctatatgtctgagaaaacatatataagtacatatgtgtaattatgtcttattttatacatgattttatagttatagtgttttcacatcatgcttttttacttaattttcactacaagcctattagatacaaacgttattcgactttcttacagataaagttacagatgctaacattttttatatcattttccccaagtctaatagtcattaaaaggctgaggcctcaaaacggttctgctgaattcaggtagactttctcatcccattactaaagatgcccggactattgtgattatgtattttcaattttaaatctatcagattagtcttcactgaagttttcataatttcattttcagtttaaaaatttatagtggttccttatttcccgcgacactgaacaaaaactacattttttgtcttcaaacctcaccaaaaccttcccctactctccgtaactttccaccgcctggccagcagaccctcgccaagtatccacgccgcccagtcggcttattctcactttcttgccttagttttctctgggttcttccgttctaccccaaatattcttcttattctgcacctatttaagcctactctagagcagaaaattggcttcaaccagcgagtcctattctcatctgattggtagtgctattgtgtgcaactgtttgtaatttagcaaatatttatttaaataaaaatattgcttcacaaagttatatataactgcactttctatagttgtctgtattaaattaccgtgtgcattgtcttcttaaaattactagtactttaaaaataaatatcaatgctgcttcaacagatctgtgcattctgaggcccatgaaaccagaatattagacccgtatttgtgggtagacagtaaatatatacaaatattttgcaatcattacaatttgcattaccaactttcttgatacacgaaaacaatcactagttaatttttcaataaacatgatcctttttggtgctaattgctgacaaatggtttaatcgcaacatataaggtgctaagacaggaaaaaatacacagttgtcgatttaccatgcaataaataccaggcctctagaaagaatgtttgtgccacaacttctcaaacattaatgtgctccttatccccaggccatgctgatggcactaatatcctgatgaagtacatctgggggagggggagatttgagactctacttttctaacaggctgcgtggtctcggaggagcaaggatttagactatcctaaatgccctagggaggctgctaagcctttgcccacacacggtttacaaacacctgctatataattcccctgctgagtgtcctagcaggatccacacaaatgcctcaagtaccctgcagggacctcccacctcctcctccattctgaagggtttactaccccttgctgcttctctgaatgcactttgctcaacaaccagccctctctttaaaaggaaggtgtgatgttggatgttgacatgtttggggaaaggaggatgtgttggtgatttttttttccgctaaccctgcgctaaagtgagaatcctgttccccgcatgtgtctcctcactattggatgagaccataggagacgctgcaagtgcaaatgaaggtctccccatcccatcaaagcgtattttagcacgactattaataataatggcttgttaagaactaaaaaaaaataaggaaaaatattaaaagtaacataagaagcaggcaccccagacatcaaaaaaaaaaaaaaagtgcccttaaaaaaccaggataaacgtttaccaaaaacacgagggcttctgtctttataaggtgatccttgcactcccttccctgcacaactttttctctgcttttctctgcaacaactcatgctttttaagcaacatcctcaggacagcctctcagttaacagttttcgagaaatgattgtcatgtgggctgtttgtgagccgctgtgaagcgaaaatgctgtgggataagctggagaggagaggaggggacacacgactcagggcccaggtgacaggcatgtagcttataggaggcacgtcaggacacccttcagagtttgaagatgggcagtgacaccaactcatttgtgacctgataaaaccctctggttgccatcaggagatgaacggagagagggtcctgagtggggcagacgtaggaagcccagtagggcagcccatgagagagaggagagtggactgggggaggggaaagatgtggatggacttggacccactgagtagctgggaccaacagggtgtgggagtcacaggaaagactttatgtgcaagcaagagagagaagtgattcaagcagttggatagactgagatgctaatttctcaaacgggattcacttcagggcaagtagattcaggggagaaaggagttttatcttagcagtgggatcgtgaggcacagtgggtactgcaattaggcagtgggtattaggtctggaactgagaaggaagggcaggcagcaagtgaagaccatgaagtatttctaacatttaccgcaaactggaataaagtactttccggctctttctatgccttattcaaattgtgagattacatagctaagactatacattgagcctgtcctaaaaattactaacaacttttttttttttttttctgagtctcactctgtcgcccaggctggagtgcagtggtgtgatctcagctcactctaacctccacctcccgagttcaagcgattctcctgtctcagcctcctgagtagctgggattacaggcgtgcaccactgtgcctagctaatttttgtatttttagtacagacagggtttcaccatgttggccagactgatcttgaactcctgaactccttgaactccttgaactcctgaactccttgaactcctgaactcaagtgatccacccaccttcgtctcacaaagtgctgggattatgggcatgagccactgtctattaacaacttttaaataataaaaaattactattagaacagaccacttacttggctaggaagttagacttgctcacaggcatgattgttgtaagttggtttacaagcacttgaaatttgatttcagagacttaaattcatgtttcactttctccatcaacttgtgctatggaaacaatcaggtatttcaaatctgatacaggtgatagcccccatcatgctttgaatgcatctcctccaaaattcagttttcaatatgatagtattaagaggtggggcatttaaaaggtgatcaggtcatgagagctctttctttgtgaatgggattaggtgtccctataaaagggctttatggagcagagtcatgccattttgtcctcctgcctcctgccatgtgatgacacggcattcctctctccggaggagagatgctgtgggtatgctgtgaagtgtctgtcaatttcagcttcatgtttgttacctcaaagtgaacaatggtgtgaaaccatgatcaaatatgcacatatatgtgtaggaactaaagatttgtatagttattttatactaatgtttataatatgttatagaaacagaataggatgcttgaaagaacatagatttagacatagcaaagtctgagtttggtatttgtctgtttgtttatgactcggacaatgtatataaagtatccaaacctttgcttcctcacctgcaaaacacaaatcacccatacctcctcagcaggggttctttgacagatgtacagtttacaaagcaaaacatctggaccctactaggccagcagcaaatagtcacatttattattttgtcatgagaaataataattttccttcagatttaatgtaaaagaaagcatttttctggtttttaaatgaaggtcagctaaaacctaaataaatatgaaagaatatttttacttttcatcagaatgttcgggacatttaccatcaaatgttttctctgcaccgtggatatccccttatgccactgtcaatggaatttaggatgcactcgagcaaacactgggagacgtgaagcttaatccacagttggccaggggttgacagtgtctcctcaatcatatgacatcttgagcttacacgaaccagcaccgatccatatacaataaagcactgaccccatgactcagaaagtcatatacacaggtggtagaaatgacaaagttatagcgaaatctctatgtttcaacattactgcctttatcagtataatatctgacatcattgatcaaatacaaattccctgccattgtgaaaagtttttctaattgcattacttcatttaatcttggtaacaccctacaagatagactctattttttttattacttgtaagaaaagtgggcattagaacattatgcaaatcacccacattcttatgactagtaaacggctctgtgaggggtcagatatcagagtagctgatgacgaagcctgcctttcagttactctcctgtgctgtctctgggctacacctgacttatttcaccatatgtatatttactgttattttcaatgtccacctatcaacattcaatcaatcacttagaaatacattttcaaatatgattctgaaaatacaaaggccacattgaatttgagcattaatgggaatatttctgggtcctttcttttttttctattttcctcccttatctttgatttccaaaatattttcttggaataattaggcaccaagaaacatcttatttgacatgtagccatcatccaatataccattaataccatgctgaaggctgagatagaaaataacagcaagagaggaggtgcagtacggagccacctctccacccacggggatagaactggtcacactgcttttctttactatgtgtaggtggtgcgatgtcgggtgtttccaaggagtaaacaccagcaacagaaatattcttccgtttgtttgaaaggataaagaaaagtgtgtctgaaaatgaatgtccatagagggaactaatgacttggcttttgcagacactaaagcaaacttaaaaacaacaacaaaacaaaacacattaaaaaaaaaaaagcccagcagctatgaaatgcaaaattgaggataataggattgagcgagaagtatctttagatgttctaatcctcttgaaaatatctagcacttcataacccaaggaagaaaaaaaagcatttatgaatttgaaacagacaaaaaagctatgaaaaagaaggcagcagaatagggttggcaaataaacagctaattattacagtgaaaggctctggcttggcaaataaagcctctagaatgtttactcaggggtaaattggctgctcagccaaagctgtgcaagtaactgacttttacccatctacttttagagtgttgttcaaaagagacaggtacaaacatttttaaactgtctttttttcggaatataaaacaaagatttattcaataaaaagaaaattcctagagaaaaaaagctggaggaacgtaaagtgacactgctgtgtgtcataaaaaactctgattcggatgccaaccaccaatgtcctatggaacccaagagtcccaggctcactaagcatttaatcaatctcgtatcataaaaacttacagaaggattttatgcacgctctttgtggccgatttcaaagggaatctgcattttggagcctatcctcatcctccctgataagtgggcttgttgggcatactctggtaaactagtcaagcccagaagcacatgttgtctctgataatgaacaagtgacttaacctatttcagcttcagttttaccttctgcaaaataagaataaaaacgatagcaaaaactaggaaataatgagtgctgacaaagatgtgataaaattgaaacccttgtgtactgtcaataggactgttaaacaatacagccactgttgatgacctatggtggttcctcaaaaaattaaaaatagaattaccatatgatgcagaaattgcacttctggctaaatacccaaaaggattaaaaacttgtacagttatgtccctagtagcattattcacaatagctaaaatatgaaagcaatcgaagtgtctgccaagagatgaatggctaaaccaaatgtagcctctacacacagtgggttattactcagtcttaaaaaggaagggaattctgacacaccacatgctacaacatgatgatcttgaagacactatgcgaagtgaagccataaaaagacaaatactatgtgattctacttatgtgaggtgcctagagtagttgaattcagagagacaaagtaaaatgatggcttgtaggggctggaggaggaggaatgggaacttgtttaatatgtgcagagtttcagttttgcaagttagaatagtccaccagagatggacagtggtgatgattatacaaccttgttaatgtacttaacaccactgaactgtacacttaaaaatgaaaaataataactatatgccacagatgcacggtcattaggataaagttagatagggaacattaagtcttgctgcacaatagccaatcagtacttttcaattttcattctctttcatttacaggtgaagaaatgaagcagcaagcacagctcaagctgcctcttagaggacacaggttactgaatacgttttcaacaaaatgaactttcaaggcctgataaattctcaaaacattgatctgaagtttggctacatattaaagatatgatttggatttgtgtacctgcccaaatctcatgttgaattggcggggcctggtgggaggtgactggatcatgaaggcagctgttctcatgatggtgagtgagttctcaggagatctgatggtttgaaagcctgtggcatttcgcccctagctctctccctcctgctgccatgtgaagaagggacttgcttccccttcgctttctgccatgattgtaagtttcctgaggcctcccagccacgtttcctgtacagcctacagaactgtgagtcaattaggcctcttttcttcataaattacccagtctcaggtagttatttctagtagtgtgagaatggattaatacaattaataagaatagtaaacacagaaaataaagaagaaataaacatatgatccaaacgtggaaggttgataagaatgttgactacagtaagcaaaccagctgctgagaataaaaacatccccgcattttctcaaagttggccattacaaatccttacatggttttgcaagaaatgctttatgggttctttccgaaaatgtgattctgattatttagaaataaccagcatgaggttaagcaaattccaacttaaaatctcaataaagtaggcattaaagacaagttaggggcttagtttcagaatcaaggaccaaaaatctttttttttccttttattcccagggtataagcaatgtggaagggagaaaattagagaacaaaactttgaaaacgagtctattccatgtgcactgggaaacatggctggaggagtttgcccatgcttccttctccagtgggtcaggctaactttttacttaatggaaaaagtaaacaaacagatgtacctggactagaatcttcacaggcacatctaaagaagaaataaacctggaaatcctcatttcataaataagcaaataatgtgtctatcattaaatttcaaaaagaaaaatatataaaaagaaagatatatagtgatagataaatgacagatgatagagtagatagaaagataggaacatacacagagaggaagactggaatatgatacatagatagatagatagataggtagatagatagatagacagacagacaacagatagaaagatagatacatagataagtggatagataaataggtcaaaagaaagatagaaaggtagatggatagattgctaaatcagtagagagatgataggaagatagatacatacagagagatatagatagaaaaatgatagacaataggaagatagatatatataaagagataggaagatgataggaagatggatacacagatggatagttatatagaaaggaaaatgatagatgatagatacatagatacacagatcgataggaagatagaaagataggaagatgataggaagatagattgatagataaaaaatgacagattgattgatcaatcgctaggttgattggcaggaagacagagaaagaaagatgatagataggagatagcctacaaagcatctgataagtattttctcaaaatataaaaggaaaattaggcataaactaaaatgcatggataaatcaaaagtattaacaaagctgagaaactagattccctagtgataaaaggcaagtagcagaaaccataaaatctggctcattataaatgaaaatgagtgaagagcgtagtttctacagctttgaggttatcacccactaagccagccagagtctttctccgagcactaaataaactataagcacaatggcaaatgactgttcagtcatttaaatgaaaaattcataataatgggccaactttccaaccatatttccaaaggttacagaaaaattgtctattggcaattagagaaattgccaaaggacaattcaaaggagtgcgggcctattgaggtctgtccctgcttccaagggctgctggttctagcatcgtgtacaattctcttggcacttaaactccgcttcattaacttttctactacaacagctaatgaaatgaagcatttcaatatccaaactccagtaattatttaaaacagatttagattcattcaaataaatgactccatgaaaatctcatagttttagctctatttgaagctcaacatggtcagagaataagtcacacatatgaagatacagagaatcagtgacagaactcaaatgagaactcccttcttgctgacttttccattacgcatttgaacagaccctgcagccaacaagaattcattacgcatgcaggtaaaatgaactgacgacatgtattttgaagtggactctgggggtcctttaattcttgagtaatcatggcttccttgtgatattttgtcttaatttctgaggaatttcaaatacagacagacaagagagtaatagctttagtaaaacaataatcacctgttttaaaaacacaggacacaatcgtatttgtcaaatggctctgtagattccaaacagactgaaggctggtcataagggagattaccaattctgataattgcatggtaatggaaactccacggagaacagaaaactgagctacacagaaaattggaaactcttatttaagctcatttctccacaattcctctggcctcaaaaatgcatggaatgaagtgtcagagttattaacagttaatatgaaattattacttgtagtgtctttgatcaggctaagtaggagcttctagttaagagaagttgatgggtgtaattaaattgctaataaagaggtacagactgacgaaaatccacaaaggctttcagaggttaactgatttaccacccctccttcaacctcatctctttcgctcagcctgtgccaggtgctaagcctggggcctggcacagaacaagaggtcaatacaatcagtctacggaatgaatggaccccacgtatgcacctctcgacctgtctgagagtgtcagccaacaaggtgcgtggcaatgttattcccaggccccatgcgtgagacaggagataccatgatactctgtctcttatcgtgacgtttttccaccatttccaccatgtacaaatcattaccagacgctctcacttcctttgtgcctcaaatgcccatcttttgacctcgatgcctccccgcactccaagcatagccatctcatcatagtccactgtagcttccttgcaggctcatgcttctttcaagttggaggagattatattggtttactgaagcaagtcccatttcagaagcagaaacattgaatgattttctccaggtccacacagacatttaacagtaaactgagaatcagaatttaaaccccagtactcctgatctaaagtgagctcaactctaatgtcaccatccttctcaccatattaatgtataatatatagtatataatatataaatatataataacattgatcaacattcttcaattaacatataataaaaatttatattcactaactagattgtatatgaaatatacaataaacgagtggttttaacaattatagtttatatcaaatattaatgtttaataataataattttacaactttatggtttctatccttggttccatgtgctgtaattacctaatttatcttactgaattctcatactaacaatatgagtcaatattattaccctccattttcaggggtcactgttgtccagaaatattagatgatttatccagagttcatctagtaaggggtaaagccagactctaatccaaatgtccagctctgaagtgtgtgttccttcccaataacagaatggctttttgttgtaataaataaaataaaaaatattttatggtttgccttttcccttatatttctatccaaaagggaaatctcactgcatgtgtcactaatgcctcaattatttcagatttttcaaaatggcttgaacagaggttcaaacactgtctcaggtagttttcaccatttctctctgtggtaattttcttcttgtcatttctaaaaaatgtgaaaactttcttcatagatttgctcatgttcttttttcttttttctttttgcagtatgttgaatcccacaggcttcaaagaatatgtcactttttcacctaacataatttaccactcactttgtgtagaaaaccatgacttttttagactctccaagactcaggacttctaacaaaaaatccccacacttcacatcatggaaactaaggaaaagtctgttgcattctaaattccattaatgacataatattaataaataaatacatatgcacatgtgtattaggccattctcgcattgctataaagaaatacctgagactgggtaatttataaagacatttagttggctcatgtttctgcaggctgtacgggaaacaaggtgctggcatctgcttggcttctggggaggccttaggaatctttcaaacatggcagaaggccaagggggagcaggcttctcacacggccagaagaggagcaagacagagttgagggggaagtgccacacacttttaactgaacagatctcgtgagaactcactatcatgaagacagcaataagtcgtgagggatccacccccatgatccaaacatctcccaccagacattacctccagcattggggattacaattcaacacgagatttgggcagggacaaatatccaaactatattatttctcccctgacccctcccaattctcatatccttctcatattgcaaaataaaatcatgtcttcccaacagaagccaaaagttcataactcattccagtattaagcctcatctgagacaaggagagacaaggcaaatcccttccatttatgaacttggaaaatcaaaaataagtttgtagcttccaagatacaatggagatataggtattgggcaaactttcccattccaatagggagaaattggccaagagaaaggggctgggccgggcgcagtgactcacacctgtaatctcagcactttggtaggctgaggcaggtggatcacgagatcaggagcttgagaccagcctggccaacatggtgaacaccctgtcgctactaaaaatacaaaaattagctgggtgtggtggcaggcatctgtaatcccagctactcgggaggctaaggcaggagactcacttgaaactggaaggtggaggttgcagtgagccaagatcacaccactgcacaccagcatgggtgacagagtgagactctgtctgaaaaaaaaaaaagaaaaagaaaaagaaagggattacatgccccattcaagtttgacacccagcagggcagtcagtaaatcttaaacctcccaaataacttcctttgactctgtcttacatccagggcacaccactacaaggggtggtttcgcaaggccttgggcagctttgcttctgtggttttgcagggagcagcccccaaggctgatctcagcagctggagttgagtgcctgtggctttttcatgctgagggggcaaactgcttgtagatctaccattctcagggtctggagggcagtgatcccttctcacagctccactaagcagtgccccattggagactctgcatggggtttcaaccccacatttcccttggcactgccctagtagaggttctctgtgagggctctgcacctgcaacaggcttctgcctggatacccagggtttttcatacatactccaaaatctaggtagaggctatcaggtactcttcattcttgcattctgcgcacctacaggcttaacgccacacggaagctgtcaaggtgtatggcttgcacccttcggaacggggtctgagctgcacctgggcacttgtgattcaaagatggagccagaacagccagtatgcggaaagcagcatcctgaggattcacagggccgtagggccctgggcctggcccacaaaatcatcttctcctcccaggattctaggtctctgatgggagggtctgccataaaggtctctgaaataccttcaaggccttttccccattgttttggaatattagcacttagctcccttttagtcatgtaaatttctctaacaagtagctgctccacagccttcttgaactcctcttctgaaaaagcttttttcttcctctgccacacggccagcctgcaaattttttaaacttttatgcattgcttcctgcttaaatgtaaatttcaactttaagtcatttatttgctcctgtatttgaacataggctgtataaagcagccaggccacatcttgaatgttttgctgctttgaaatttctttaaccagatacccaactcattattctgaagttcaaagttccacagatccctagggaaggggaaagatgcagccaagctcttcactaaggcataacacacatgacctttgctccaattcccaagaagtttctcatttccatctgagaccccatcagcctggtcttcattgtttatatcaccattagcatttttgtcacaactatttacccagtctctaagaatttacaaactttcctttatctccctttcttattctgaggtttccaaaccttcccaacctctgcctgttacccagttccaaagctgcttcaacatttccaggtatctttatagcaatgtcccactccttggtaccaattttctgtattaggcaattcttacattgctataaagcaatacctgagactgggtaatttataagaaaaagaggtttgattggctcatggttctgtgggctttataggaagcatggtgctggcatctgttcagctcctggggagacctgagggagattttaatcatggcagaaggccaagggggaataaccatgtcacactgtcacagggccagaacaggagcaagaggtgggtggggatgccacacacccaggtctcaaaaacacttattatcatgaagatagcaccaagccatgaaggatccacccgcttgatccaaacacctctttccaggcccacctccagcattgggcattacaattcaacatgagatttggccagggacaaatatccaaaatatattagtatgtatataatttcatgctgaaaggatcattaaaatgtaagtgggagatgaacaatgagaacacatggacacagggaagggaacatcacacaccggggcccatcacggggtggggagcaagaggagggagagcattaggacaaatacctaatgaatgcagggcttaaaaccaagatggtgagttgacagatgcagcaaaccaccatggcacatgtatgcctatgtaacaaacctgcacattctgcacatgtatcccagaacttaaaataaaaaataaaatgataaaatgtatgtctaacatacatttttaaaaatagaaactcaagccatatgccccaaagtaattttcaacctcaagtggattatttctcacatgattttcaaatttaaaaataaatgcaatattcattccatttgaatgcataaggctttttggaaaatgtgagcaaaaaaactaccattcatcaacaccattacagccactaattcacctgacatcaaaacagcctaaatgcagacagtccatctgaactctactccatggattcattgcaaatacgtcatttcatatatttataatttggtcaccaaacctgtccagttatgaaggcagcatctatcacagaacactgcaccatgtgcacataattgaaactcctgtgcccctcagttgatctctactgttttactcctcatgacacctggaagcaacccttccagtaaaagaaatgcgcatgtataatccactggtctattaacagaaaacaagcatggtaaatgattttctggataatgcattccatacaatgctcgtctaagttattttttagaagaaaatcaatagtacctcagaaaggttcaagagtaagagtgaatggcagaaagtctcgagtctcagggcatctgagatcaattcttccggagtctatgtctgcacagattcaaactattacaattagaggtcgaaagttttgtttacaaacttttacatggaagagtccaattaatgattttctctattaagctgaccaaactaggagtatggaaccgaagaatatatcaaaccaatccacaaaacaaatgctctgaattagaatcaacaatgaagattttaacaattaattatcaccctctaaaaaagcatagctaagaacaagcttcagaatttttttaaaccagtcatagaataaatcaatatgccaaggaggtattattttaaagaatattatgttaatatgaaccagaaaatgttccaccaagcttgtcatgtcatggtcaaaatacttggaagagcacagttcttggcgtaggtgtttatgtgcatgtgtgcctgggtttccagcccaaattaaagagctgttggaacaccctcagatgtttcatttgtgggcctccttttaatagtatcccaattttaattagcactagggaagcagatgtggcagagaaacgatgccaagaatctgaacttttcatctccacttggagtgaaggcatgaggttcttccatttcagtgcatagcatcgtattggttagcacagcttgccgaatatctgaatactggtcgatgtatatatataggtgtgtgtgtggtgcccacttttcagtattaatgggaacataaatatcatgttaattcagagtaatgcaaaacccagtatttgccttcaagtgtcagataatattaagaatagacaaaattggcttggaaaaatctccccagtcaactcttctcctaatgaaaaataaaatcataaaattaattttttccactcttttttgtaaaaatgaaatgcaaccctcccaaattcccagtgctatttcttaaagttagttaaaatgatgctaaagttcttaaataaatacaaaagtcctattgtctctgatgaaaactttgcaaatagagtgaggaaaatgacttgaatgcatttgatatgaaaacatattattgttatttcaattaaagcactatggacttggcataggaaatcatgcatgtaaacagaaagaacagcatgtccagaaatagatacccacctaccagatgatttaacatagaaagtagttggaattttaaatcagcaaaaaaaaattagtggagaaaataatgaaaataattacccagcaaagtatttaataaatgacactcagaaaactgggtagccatctgagagggtgacatcttaaaacaggatcacactgagatcaacacagattcactctagaataggaagcaaatacttacatgtataaatgaagcaaagctacagattagaaaattagtagctctatgtataaatgaaatcattcaaactttagaaaaataaatcaattttaacagaaaatagagaggacttttctaggccacagttcataaagattaagatgtttcaattcatagactataaaagacatttgaaatacatatgactgacaagtggctaataaattattgtacaaagaactttcaataaaattgaataaaaccaaagaaaaatgagaacatgaactttaaaaaaatataaaatataatggtcaaaaaattaccaaaaaaaaaaagtattctctactgagtaatgatcaaatgaatgaaaatggaaacaatgagtgattttttttgtttcattttgactgttagatgtgcaagaattaagaagattggcaattataatgatttctttttattgcaacataaattattccacacatagaggcccaaaacagcacacatttattccaacacgatttctgcagttcaggtacgggcgtggcctcaccctgagggtggcagcgggctgctttctcacctggaggcgcgggaagaatccacttggaagatcactcaagtggtggcagaaatacgtttcttgcatttgcgcagctgaatgtttcctgactggctgtgggctctcagcgtccagaggccctgtgttccatgttctgtgtctttcttcatcttccaagacagctacaaaggctctccctcacatccagtctttctcaggccttcaatctctgaccagtaagaactctgcccctagaagagcccgtctggtgaggtcctacaatctgagcacattctcccttcctgaagtgtgtctgtgccaacaacataacgcaatcacgggaggagggtccaccgcacccccaggtccatagggagctgtctacccagggcgtcggtcaccccacctcctcttaggattctaccttcaccaggctcctcaaacatagaagcttccagaagcaagccgtcacacctgtagtggagcagcctatttggattacccgaagatcagtttgacaagataacccaatatgtcatctgttcattgcctgtatttcactttcaagaaattgtatcctgtggcaatgagtggaagaaagtgcaaagatgtttctgaatgagtatgcatgtctgcattttatctaatagttagaaacgacataactggtcattgaaattgcaataaatatacaaacatatattttagaatagaatttttggcattttattataatttttggatataaaataatgtgtatgccatatcatggaaagtgtgatatcattcaattgatataaagacatagattatagatataatagatatgtttactgatgtggtttgtatctatgtccccactcaaatctcatgtttaattgtaattctcagtgttggaggtggggcctggagggaggtgattggatgatggggccggatttctcatgaatggcttagcaccttccttttggtgctgtcctcatgatagtgagtgagttcttgcaagatccagctgtttaaaagcatgtaacacctcccctctcactctctcttgctcctacttttgctaggcgatgtgcctgatcccccttcaccttctgccatgattagaagtttcctgaggcctccccagaagcagatgctgccatacttcctgtccagccggagaaactgtgagctaattaaacctcttttctttataaattacccagcctcaggtatttctttttcttttcttttctttctttctttttttttttttttagatggagtttcgccctgtcatccaggctgcagtggagtgcaacggtgtgatctcggctcaccacaacctccacctcctggattcaagtgattttcctgcctcagcctcccaagtagctgggattacaggcatgcaccaccatgcctggctaattttgtatttttagtagagacagggtttttccacgttggtcaggctggtctcgaactcccaacctcagctgttctgtccacctaggcctcccaaagtgctgggatgacaggcatggaccaccatgccaggctagcctcatgtatttctttacagtaagaacagcctaatacatttatagaggtatgacaaaaacctaatagctttatatcagttttgtgggttgcagcttatttttttgtcccttccttttatatttctggactatgtaaatgtatttttatctgcagacacattaagtaagaaatacattggctgggcgcggtggctcatgcctgtaatctcagcactttgggaggccaaggcgggtggatcacaaggtcaggagatcgagaccatcctgggtaacatggggaaacactgtctctactaaaaatacaaaaaaaaaaaaaaaattagccgggcgtggtggcgggcgcctgtagtcccagctcctagggacgctgaggcaggagaatggcatgaacctgggaggcgcagcttgcagtgagccgagatcgcgccactgcactctagcctgggcgacagagcgagactccgtctcaaaaaaaagaaaaaaaaaaaaagacgttgtcactgtttatttttaaaagtttgtgtctgtattcttttgccagggctgccataacaacacaccacagaacaacagaaatggattttctcacagtcctggaggccggaagtcccaccgcaggtgtcggcggggctggttctgcctgaccctatctcctttgtgtgtagacatcatcttcttgctgtgtccctgcatggtcgcccctctgtgcacctctgtctctgcaggctaacttcctctttgtatgaggacaccagccacattggattagggttcaccctaatgactaactccatcacctctgtaaagaaagaccctgtctccaaatacagtcccattctaaggtactggcagttaggactctaacgtactttttttgaggggactcaattcaacccatgacaccaagtagcaggcagaacctgcagactttctatctctggtgccactgcccagtcacaggactctgtggctctgctatgccggagatgctccgattgctggaagatattcccataactgctctcactatttttaaaagttgaagactgcaccaccgctggcctaatttcaagctgtttcctcccagcaacactgtttatgttagaaacctcatgaaagaaaggattggtgagatggttgagccaaattcatttctccataaattcatattgatgacaactgtggcccaggctttgcgcaaaatgctggggattcgaaggtacagcagaatctctgccttttctttaagaagtgtgttgtctcatatgggtatatgattttttagattgagggtacatgtgcattttgctacctggatatactacataatgaaggagactgggcttctggcatactcatcacctgagtagcgaacattgtatccaacaggcaaccctcacccctgctcaccgtccttccttcctccctgtttttggagtcctaagtgcacttctttccatcctatatccatgtgtgcccaggtatgtgtgttaaacccatgctcattaggtgcctgcacgtctggtatgtatttgaaagcagagactccggacttcctggagcctgccaaatcagaatcgtgcagggctgggagtcaggaatgcattttttaaactttgcaaggtgagaaccattggtcatggaggactaaacagctgcacaaataggaaatcaaagtaagaaatgccaagacatggacaaaaggccacagtgggtgcctaggtccccccaagacacagcagactgcctggggactgagccctgaaatgagaagatgagaagcaactccacacctcaacaacagtgcatcaaaggtgggaaaacaggcaaagcacacactgtctgcatcgatgtggtctacatggacataaacacctgccttccagcctcagagcaaagcactcattctccctgtgatggtctctgggcagaagcctcatcctggctggcaggtccagccacctccagaacgtagtagtcacttcctttgaattgtttgcttatttttcctgtctcagctatctctaccttaagaattttggaaagccaacttccccagtagcctgaggcttatgcctgcatgcccatcggggccttacccactgcagccccgaccccggcttgcctacacattttcccccagagctgctcttctttctgccagggactgacattttcaaactgtcactttcacaggtagaggctgccgctgtgcctcttcaatgaaagaccataacctatccttcagtgtcagctggtatcttaaactgcacacagggcatttcactgtctttactcctctttgccttttactgatttaggagctgtcattttcaaagttcctcctgctgaagtggaaagttctgggctgactttttcatctccacttccatttgcctccgtttcctttatcctcacacgatccctttgtttgctttgtgaaatattttgagtattccatgtcaggtttatttctcaacgcgaagcacattaaactccattatagcatttttaaaatgtgtgagatatatagttgatctctattagccactcttatgcataggacccttgattcttttataaaatattattactttgcatattttgtacagttccttgtgcagaaaggtcaaggtcttcatatcactactactattatacaaaattaccctttttgaacacttccactgactacaatactgcttttattattagccacatttcacacagttagaataggtgaagttttgggatgctcgatgtgtgctaagcatggacagaggaaatgcgttatttaatttaatgaataaacatgctggattttagcacatggtagagcaaaattacatgtcttcagtaaaatgcctgacatataatttgcaaactgcagaaagtaactgatattgacggcgttggactctgcgtttcagtctgatcttggaagattaatttgatcctgggttggcagactatggcctgtgggtcgaaaccagcctgcagcctgtttttatacacaagctaaaaatggcttttacatcgtttttaattgtgaaaaacttaaagacaaagaatatgccactgagactgcatatgatccccaaagactgaaggtctacgtggccctttacaggaaaagagagccagtgtctgatttcagctaccatgaacaagaagggaagtatgttaccagcttagttacctaaacactgctgccttgacattcaacaacattctgcttgacagccaaccaataggtttgcaccaaaaacactcctgggtgcagacatgtctgactgcatgcgagttccttttttgttgggctcctgttcttagctggcagtatgataaaggtttcatgccaacatttgcgtttagtccttcaaaacgggggggagcacctttatgcccatttgcagataaagaacttcagtgaagtcacttgccctgtccagggtcacagagccagcaaatgctggggatgggaggaatccatcactcaattgcgggagcctgactgcaactgcactgcacagtactgtacccaagcactcctttcaaatcccctaagattgtgtgaggtagatttaagcaagggcaactgggataaacctcattttacaatatacttgatgggagttggccagtttgagctatatggactgtgtggattcacattctgataatttacaatctggctgacataatgcctacaacctatataaaagtgtgtgtctatatataaagagagacacaagcatactcacacatacatatcatagcatgtgatttgacatttaaaatcccagaagttcctatttaaatgtaagtttctaatgaaatctaaatgtctggaaatattgtattaatatcacaaaacagaggagaagattgataatgaaatagaagcaaatagatatgcatataaaaaaatcaagataaaagtctcaaatacctatgctctttatgttcataagtgaaggattttaagatttacaaaatatctcagttaattcatttatgccaggtctcctaacatatcctcctaacatttgagaatgatgttgttttaaaaattttgtataaagtaaaaggacagtttcctctgaaagatgccctctctgtgggcaaacatcatgtttcgggggtgaatgcagggtataatggaaatggcttcgattttggaatctgaaagactggagcttaaatcccacctgagataatgaggcattttttttttctggtaacatcatctgtgagcaacagcatctatgacgattgaagagatacacacagacatatccacgtgcatcctctgtcccctccacccagctctttgcaccagttccgtccttggccatgctatgtagaagcagaatataggcagctatctctatctaaaaggcctgactttaaaaacagaagcttaatcatgtaatttgtgagaaagactgttttttgtactctttgttgcctgcaaaatgctagcaaatcataaataaacaatagacaaactccactccaagcaaaagccacagctgatagaaggctctgagaaccagaccttgaaagtaaatagctgcctgggagttgctctctctttgaccagggaacttgaaagcagtgcactctgatgtgccagtttaactggatctttgagataatacagagaatttcagttctaattcaggcttctcctcaagatgaataagattagtgtgctgataatggaaacagctgcttggcagagtttcttgctttaaggcaggaaatgaagcctgaggacagaagatctgcctggctttatcaaggtcgataagaaccaacagagattttcagagagaaataatttaaaaggtcaagcaaagtgagaaaaacaacctggagttccctgaaaccaataaaatacattttgccggctccatcttctcactcacagacaattggtagcgaaacttttatttgctgaatccagaagctaattgcgagccatcaaggggtcttgggaagatctctgtccgggttgtggcctggggcctgccactttgaaccccacaattcgggatgggtttggagtgggtgcctcccaaatccccttcaagacctaacaatcataattggcatgcatgtaatatctgacggcttatcctatattatttattgaatcctctcaataattctgggacgtagatatcaaaatctctattttacatggcagaaagtaggcttagggagatcagggctccctggccttttgggggctactttggagggggatggccctcacaatgtatcctccaatttcaaatccgagtaatttttctctaaaaatatgatgcgtctacaatgtcattggcaaaaaaaagtgaattaaaatagaagacaacaaaagccaattctaaataatctttaaaaggaaaaatattctcccatatttatcttagaaagtgatggattagtgattttataaatttaaaatgtttaccaaatggctacaaggggcagggtattttgcccgggtccgagggacacagtggcatccacatggtttataagattggtagctggagggcctaaaagagaatgagctcaacgtgccaggtttgatcttgctcatttactaaaaggtacctgttgcattttagtaactatttgaatatattcttctagatatttttgtaaaggagaagaacgaatgtcctttatgcattcaggaagtttataaattgtatttattttatgtaagaataaacggactgcttttcaaatcattgagaaaaaaatagaatgtcaactcaaggatgaatgtaatattaaaatagatcaatatagattttaagttcccaatgccacaaagagatatttgctattttttaaaattatttttctttttttacagttttcaaataaaaattttcaaataaaataattaaataactatgatgacctttaagttggacgtggaagtcttaaaatattttaacatttgcattagtaattacattcccaattatctcaatgaccttctctatgatttattgcaggatttataaccacttttgaccaaatgtgagatactgtcagagtctaaactgttatttattttgtggtagagctgcctagtttgaaatttattacagcagatagtctttctttaattacaattttattcatttcgattggtccttataaaagttacaaagtcaaatatgataaagcaaatgaagcatccagtatcttaaactaatttaaaatccactgcctcattactggtaatttttaaaactccatcttttcttagcctcagagtcactactggggacagcttgccccgtggacctgaagcacaaatgtcaaaatcaatttcatgaagcttcctttccctcacatggtccttatttcactgagtggcaccaaatactcccagcaatcatgtcccccaccaacatatgtcatcccagatttatctcttcctttttacctgctttcacgagagactgtggactctgtttcctaagtattttcaatacctgttttcatgcaaaacttgtttctcactgtatttctggaagtcttcatatccctcaaacacacattgctataacccactaagaattcgtgtcttccagacaggatgcgtgccaatcattcattatgccacggaaagatcaagctttctaaaacacagatgggattgtatctcttttgctctttaacggagtctcgtcaagcaaggacaaaagctgaaagccacgtaaacttgcagctgagatttcctatgggctgctcctgccagcttctccaacccatcgtcctccaccatgtccccttcacattccagctcagacatcccaatatcctggaccttctctgctactcccgccggatgactatccattcctgctgactatcatattgacttgtacttatcagtttttaagactctctccctccggactagcagagccataagagctgggaatattttttattcaccttggtacccgcctgcagtgcgtaactcagagctaagtctgaattgaaaagaaaacagccataacttccttaatacttgtatgaggcttcagacccacagcaacaaccttaatgtacaaaaacagacacatagttaacatcgctttgcctgtactcttgaatacaaaaagaaacatgtcaagaaattatacaaaagataccctctccataaacatagcccttgtatctacttttattttggacagtgtgcttgaagcctagaagcctcagaggtaaaacctgtaactctatccctacagatgtgctatgtggagattctcatgtcccagctttatatcgaatgtgaacatctgcgggaaaaataaaatcatgaaaacttctgtgctgatttgggtggcgaagacgtggtgatgtgttaatttagctggggtttttgaaaattgtttttcccacgtggagttctaaacattttaaagaaagagctcacctagtcttctgtttcatatttcatttttcttttcttttatttatttttatttcataattatgaattgtcagcaattcaggatcacataaacggtgacgattcttccttatatattaactctctttaaacaaaaatgctagtttttttaaaaagacagaacatgtcttcaattttcttagaactgaaaataaaattctctaagtgtcatatatctctgcttgtaaattaaaattactaattaagattccaagaaccaaatagaaaatagggttcccttaatattttatttttaacaccagaggaaaagagcaacacatcgttgataatcagagtgctttcttctttttaaagtatttcagcctcaaaataacttttcgaatctataattttttttaatttttctgattatatatatttttgaggcagtcatcaaagggtcctatttgcacatcagtaaggaagtcgcttaatctgttatacacagccaaatgtgcaactctatattccaggtcatgctctccatccacggtgacagttaccataatttttatatatatatatatatatatatatatatatatatatattttttttttttttttttttttttttttttttggtctcattctgtctcccaggctggagtgcagtgccgtgatctcggctcactgcagcctctgcctcctgcctgggctcaagtcatccctccatctcagcctcccaagcagctgggactacaggtgcacaccaccacatctggctaatgtttgtatttcctgtagagacagggtttcaccatgttgcccaggctggcctgaactcctgtgttcaagcaatccacccacccaccttggcctcccaaagatgcttggaatacaggtgtcagccactgcacccagcctacattctatttttcgttattacactgtgaatcccttggaaggaaacaaatctttttgttgttgttgttgtcatttctccttgggtcagtacacacaactgctcaacatatctgtgagtggatgggagaaggtttctagcataatccacaacacaccatatgcaatttgccaaagaaaagcagctgaaaacccacaaagtctctttctgtcatatgaggccaaagtgtttctacaacttagggaagtatatacagcgtgtaaaagatctacattctagagctgggcagggtggctcatgcctgtaatcccagcactttgggaggctgaggcaggaggatcacctgaggtcaggagtttgagaccagcccgagcaacatggtgaaactccatctctactaaatacaaaaaattagccggctatggtggtgggtgcctgtaatcccagttacttgggaggctgaggcaggagaattacttgaacctgggaggcagaagttgccgtgagccgagatcacatccattgtactctaccctgggcaacaaaagcaaaactccgtctcaaaaaaaaaaaaaaaaaaatctacattctaaaagtaacaaaaggaaagtgtgtaattaatactaaacaaataaaatctctctttgttgcacactacaaaaatcacacatttatattttatatttaatatagctaaatcacctttaacaattctttaagcataagcaaaaactgttggggcataaattgccaatatatgttgtacaaccttatgctatttaaaacttttataattccttcccaatggcctttatccagataatcatttttactcttcattttaaaggtttaattttgtctttaaaatgataaaaatgctgatttaattgtaccacacaactttaatgttcaaaaatcctactttttgctacattttgttttgttttaagcattataatctatatatataatgaaaataattttatattataattaaaatgctattttacacaaattgtaaatatctaaaaggtgactaaaagaagtcttgcacaggaaatgaatttaagtgcttaaaatatagattctttcagaattagtatttgcgagattctattttaagtataatttcttctggcaaggaaaattccactttaacaatggtcaggctcacagaaagactgaattctagatcaacatttttatgattatgaagtcccttaacttttatgtgtttcagtttcaaatacataaaaataagtagttcaactggattgtttttaagatccctccaagtttaaaggtcaaaatgcatgaagaaaaaaacaaaaccatattgactcccaggttaacagaaaggttaacaggaagtgtagaaagtcacagatctgttttagaaaaatgatacttcttaaatattttataatttgagaacaaagtcgtgtaagttatttattgccaagaataaatctgaaggaaggtagtctaactcttcttccaaaacatggtgtgcattctagcatcccatatacacaaagccattgcctctctgccatgttccacacaaagaagagataccctgatcatgttcccacagattccttggccacagctgtaaagatgtcagaagagcctcatttgcagtgtgcactatttgtatttctgaatcatttaacttagcattaaatagttctgctggggtgtggggaggccatgggagaagaaagaagtcaagacttatcccaaacctatatatgtgacatcctttaatccttctcaaccattcactgaaagggtaagccatgtctccacctcataatccgtttccagaactccttgcatatccatcagaaagatggactagcatgtgcctggcatcacccgaatccctttgggacatgaaggtccctctccggacccctttgtgcttaggcctggagagcacactctctttaggctctattttgactccacctctagaggacaggaaatgacttcaggagtttctgcccattccaccgaatccctttcctgtgtccaggctgccgtttgggctgtggttctgtcattagccagtgctagtggggcacagaccatggcgtgttctctgagctgaagttgggtctcttcagcaacagattctacgactctgttctataaacagagtcatagaacatttaaagcaaatgagaaatatatcttcttctaaaagaaaaagtattcttgtaaagaaaaaaaaattatcattctaatcattcctaatgaagtaagctgcttgagtctatctctatgtttattttacattaaatacgaatttttagaggtaaaacataaataatacagtagaggtaaaacataaataatacaggctgtctgatcaacttcttacagtcaaaggcacctacaataactgtgataagtatctattactgtctcacaaagcaataccagaaaatctaatatctaatgaaactgacaaaaaagagagcctatatgagctttcactcataaatcataattagctttcaaagactaatataattcattatgaatataaaccttgataagataaaactatgaaaatttcatgacttcaaagccttcaattaaaattaaaatgtgttatttgaaaacctgatttttatgcacatgatagataaaatgccaaaaaaaaggcatgaaatactgaaatcaactttaacaagctctagatttaaataacaaaacaaaatcaaatacagagcttagggctcaaagaatgagtttttaaactaaaataaagaaaatgagttttccagaaattaatgtttttaaattaatacaatggtaaagaaaaattattttgaatcttaaattggatgacatgttttttacttcaagaggaagtacaactgttagaataacttgacccaggatctagtgaatgtccaacccttctccaaattcaggctatacaactacatgtcaggaaagtttgcatggccactagaaggtttaattcgtactgttataagccaacattcaatttttccttaccttttattcttagttagtgcttcatttattttcagagagtgattaaaatgagagcaatacacaggaaacaaggctggggatgaaaacgcatttcttaccctggcagagtggcgtgagggagtcccactggtacatgccaagtgggtttcgtctacaggttgcattgctgtggccgaccattcggtatccaggcttgcaaaaataatgcactttgcttccaaccgctcctgcagtcctgtttagaatacccccattcttcagggggtgggtcaaactgcagtaaggtgctgtgggcagacagacacacacagaaataagtcaacaagcaaacaaatggccagtgccattgcctttgtgagagtctataaatgaatggcttctcatttccaaaaggtaggaaatgagcaccagtatgtaagtttgttctaaagagcattccaaaacttgagagtctaagaggcaagtctcttactctgaagttgagatgatctgcagctctgagtcaatgtgaagctaggatcctgaatacagtactgtgagaaacatcaagagtatccaatctttaggcttccctgggacacactggaagaagaattgtcttgggccacacataaaacacactaacactaatgatagctaaggagctataaaagaaactgcagaaaaatcttataatgttttaagaaagtttacaaatctgtgttgggcagcattcaaagtcatcctgcgctgtatgcagcccacaggctgcaggttgacttggtctagagggatcattttgaatgacctcactcacctctctaaagcagcttactgacttaaataagcacatctgtcaccaggataaaagtgatagggtactgcacaagacatcatatttgaaacaaaaatattctgcgtgttttttaagtgttgttaaaacagagaaagtagaaatatataacattttcttaatcaaggccattaatttctttccttttgactgttcagtgaaacttctggactgtacaatgatgtagatattaaccttcttttttagcatatgggatttgaatgaaatctttgaagaaaatgcattctcttgagtcaattacaatctcacaatagctttaatcatccctctttgtaaggagacattttaaaactagagatgggcatttgttaaaataataattttacccacacagaatgtcatatttatggctaaaagtctctgcatcttatttacacgtttagacaaagaaacttgcttcatctgcacaaggctaggtcactactgcataaggcgaggtcactactacacaaaatcctaggaactcacttcagatgaatttaaacaatacaacagagaaggtccttaagaactgggaattctcagtttctttttaaagaattttagatcttccacttccctctggggcttccatataaaagcacacacacgcaggtctgaatgcttaacattgctcctttccttggaaatacattcagaagaaaccttctgaaggttttctatcatagtggtgcccagaagcaacatctatgtgtctggcctcagttgtcaaccatgttcctacgagaagtgtcctcagaaaatattctcagctgggtgagcctctgaagtaccatttccttttttttaatgggctgatttttcttaactgaaaatccactaccataagaatctcttgattcacagctccattggccacaccatgttctacctccagttatttctagaccaaattcttctaagttttgaatgaaccaaaatacttagtttagacaaagtatgagtacaatcaggcaccctgaatatcaatggcttggaatcactgtgctagtaaaaaaaaaaaaaaaaaaaagttaataaaaaatagaaggaacaatcagactgtagattcctctccaaagtcatagataagttaaataaagtttgcaggaagtgagaccatgaggctctaactctacagattccaataaggctccgttttcttttactgtgtttcttctctcaccagcccctcaacatacctcttctttcctaactcacttaggataagacatgaagggccctacaggggaaaccatagcacagaatacaaagagagactggagcaggggccctgccagcccaactcctgctgcaggaagaggaattcagaggagcagggcctggtccttccactctgctggtgcagcctcggaaaagctgggatatagaatgaaaagtctaatgggtacccaggtgagagaagactgggacaggtggatattctggaatttcggtgtgaatgccaaaccagtctgtactttcaacccgcccaatacagaagctttcatttgcttctcatagtatgaaaaggacattgttaattcagcctgcgcttagcacagtttacggaattgtccagaaccactgttcgcaggcatttctttgtcgtttttaactcggatttccaattatgatgattcattatattgcttttatgcctgaatgatcaagagtttacgtgcatagggcaaatacatgttggggatgcaacgtgtggtcatgtgacaatatcatgggctagagttcccttggccacatgttaatattttagggacactttcatttaatcaatgctcaaaaattactgatgctgacctagcagagatcactgagtcatcaattctaagtaaaaagctgtgagatagataaagaattttttatattcacatatgacacgtgtctatctatctgcctctctttctctctctctctccacttaaacaacataaaattgtgtattcttcttctcccaatacagtttaacaatgaggctctccttgtggtatgacaacaaataaaataccttttgaaagacgtagaaatcattgttctcacaattgaggatataatcatatcaccaggctactaagaatttctctgcaggtaaaacaagataaattatgttcatcatgattttctctgagctgaccatgtttccacattggaaaaattcaaacacctttaagagtctgactatcggccgggcgcggtggcttaacgcctgtaatcccagcactttgggaggccgaggcggccggatcacaaggtcaggagatcgtgaccatcctggctaacacggtgaaaccccgactctactaaaaaaatacaaaaaaattagccgggcgcggtggcgggcgcctgtagtcccagctactcgggaggctgaggcaggagaatggcctgaacccgggaggcggagcttgcagtgagccgagatcgcaccactgcactccagcctgggcaacagagccagactgtatttcaaaaaaaaaaaaaaaaaaaaaaaaagagtctgactatctattttttggaacaaggagtttgctgaatgcaaatcccatcattgcatcgatgtctttgcagcaaaggtctgagtatattttattaaaccttccagaggaagaatatctgaatttcttgcctgttatcctcacatcaagggcctttcaaaatcttgatgctttttaccattttatatgtctaccaaccagagtgagctaaaaccttattcttacaactgctgttttaacactgtttcctggttttccctttggacgctcgtagtccctaaagacgtaaaacaccaacacagtaataaacaatcctccgtcagcacatattgttcacttcccatacacaatgagcatctttcacgggaaaacataacttgaaagctgtcaagggcattgctgagtgagattttgagaaaagtttagattttctgcttagtaattgaaatgtgctcaggaattaagagtctgcctactgcttctgtaggaaagtttaaagaatagtgtggtcagatcctactgatgattgtatacaggatttaatgtctaataaatatattgactgatttgatcaatttgttactaattgatttagttaatataaatcactgctggcagagaatgattacagtatataaagggcaaaataatttacattttgatgaggaatatatattaaacatatatttattatgtatatggttatttgtacaaatatatatatacacatatatgtagtgtgaaacatacataaagagacctgcagatagatacaaaaacataactattaatagtaagagattatcatcacttatgcaattaatagaaatacaattatctttttctatttgtttgcttaccatttaaacatattttaaaattaattttgattatattagtttatcttttggaaaatgtctttgctttctataatatgaatttcagcagtttataattttaacaataaaattctaaatattaagcaacaaatttcctaatgtagtttagaggaatcattcagaataattacccatcatatatttctactgtagttaattattaatctttaagaattaggattatactataaatttctatttaaattgttttattcaatgaaaatcacctgttttaaaatactttcatataaaatctaaacctcatttacttacctgcatagcgaatcttgaatcctttcttactggtggcatggtcagtggaccagcggagatataactgattactcctgcttgtaaaatttgattgttcagtatgattcccacttaagactactagcagaggactttgcccagaagaacctaagtgaaacagaaaaacaaaaacattcagagatgagtgagcacctaccaaatgcatactaggtttagcttttgattacactggagtctacgtgtgcaatacacagatataattattacaaaagtggacaacaaattccaaatggctatagtgacagatatattttctgataaaaataagacaataatgtacaaaaagaatttcaggtgcatatgctattaatggtgtcatatttaaataagccttgtctataaaacagcagtacccgaaaaaaatgaaagtaatatgtattgttgttagtatttacaatattgtacttacacaggaaaatagaaactttcatgtaatactagtggaagcgtaaagtagtagaatcactttggagggctgtttggtaatatccagtaaaattgaaggtttaattatatttctatgaaccctagcacatgtacgcaagtattatttatatagtgaacatgtgtattctaacactatttctcatggcaaattttagatcaaactagtaatttggagttttaaaaaaagaattgaagattccatgaaaaagaattagattcatacagcattaaaattaacaaactagatatacacatatccacataggtaattcttaacataacagattattactaaaaatatatatttagagataaatataataggataacaattatacaaaaaataaaaaatgcaacatataacatgtgtatctgtggacgatagatacacaaataattataaaacatgcataaccatgacccatgcaactccaacttcagaatactaacttcctctaggagaggcacaagtggaattggatatgggtgaagcttctaaatttacctgtacacattgcttctttataagatgagggcctaaagtaaatttgacaaagccctgaaattcatatctagttttttcatttttcacctgtctatggtatttgaaattgttttaaaaacgttgagacaacaaagttaacattgaaagtataggtaagaaaagaaagcacagtggagagtcacccggcattgccctcatcaccataacccaaaaccatttttcaggagaaattgcttcatggcactggggcttgccaacaacgctactctgtaatgagctcagcattatctcatactcgtaaaagcgttcatggcattttgcatttcacagttcactcctagggaacacattatggactgggagaatgcagctctcattgttgttcataatacaaatgctatgaagtaaagtgacagctgtctttgttgttatacctaaaattttatttgtgcaaagatactgagaaaccatactccactcaccgtgtaactcccaatcagagcagttctcatgatttttttcaagtaagactgttatagactagactgggtccccctcaaatttacacattgaagtcctatgaagtcctaaccctctgggcttggaaatgtgactttaaagagagagagggagggtccctaaagacataactaaggttaaacgaggtagtatgggtgggtcctgatctaatataactgatgtctttctaagaaaaggagattaagacacaggcacgccctgagtgggggccacatctgcaagcctgggagggaggcttggaggagagtcccgcccttctgaccccttccgcttaaaggttcagcatccagaattgtgagaacataaatttctgttgaggctaggcatggtggctcacacctgtaatcccagcgctttgggaggtagaggcgagtggatcgcctgaggtcagaagtttgagaccagcctggccaatatggtaaaaccccatcattactaaaaatacaaaaaattagctgggcgtggcggcaggcacctgtaatcccagctactcaggaggctgaggcaggaaaattgcttgaacccaggaggtggaagttgcagtgagctgaggttgtgccattgcactccagcctgggcaacaagagcaaaattctgtctcaaaaaaaaaaaaattctgttgaagccactcaatttatggcactttgtcatggcagtcctaggaaagaaatgtgaaacaaacaaacgaacaaaaaaccacaaaccaaaactagcatattaaataatcgggcaatgctgactttggtcagagagaaggaggatgagaagaaatgatattaatagatctcactatgaaaaatgtcatggctaaatttcctgggagatgccctgcaaaagagtggctggtatttcataatcaaagacaaagcgtgtttggtatgttggtttgctttttggcgtttaaaaggataatgtatattctgagataaaatgccactggtaaattaattaacctgaatttatgatattttgaaatgtcatttttaatgacagaactcaagagtagagttttagggttttttttattttattttattttttatttttttattttttgagacagagttttgctctgccttccaggctggagtgcaatggtacaatctcggctctctgcaacctttgcctcctgggctcaaatgattctcttgcctcaggctcctgagtagctgggattacaggcgcctgccaccgcgcccagctaacttttgtattttttagcagagacggtttcaccacgctggccaggctggtctcaaactcctgacctcaggtgatccattcacctcggtctcctaaagtgctgggattacaggcgtgagccactaagcctggccagttttaggtattcttaatccagcatctgaaccctcataatgttctatctgttctctttgtctaaaatgtaactaactttctagaaggaatagtctttaaaagcacatattcaaactggcatgtgcagaaaaccagcacggcagtaaaggaaggtatccatttctgttaccaaaatggaaactaagtattccaccagtgtacactgtaattttaattttgacagtcttctcaactgagtttcataatgattaaaatactgtgttttaaaaagcattatgggatatccactacttaagccatagagagtaatatactcttgagataataaagtataaaatcaatatattcaacatgttttttggtccacctatgaactataaaagagcccgtcttacaaaaaaaaaaaaaaaaaaaagagagagagaaagagacagaaagatatgaacatgacatttactgcaacaaaaatgtcatcgcttaaaaacatattcacataaaactctgacctttcactttgtagaaaaaactttaagaccagacaatcctagtcactgatttctgataattttgacagcaagtattatgctattgtctctaacgtattttacctgttgtttataatggctatgatctgtccaaatttgcaggagatcaaattgcaagccatgagtgcataaattattgataaataatttgctcctgaaagtaagagacttaaaagcatggccagtatatttcaattcaactactgtgaaacaaaagaacatgcataagttcaaaataattaaatatacttttatgtcctttgtagggatatatatgtctatatatacacaaacacaaacacagacatacagcctgtgaggttggatgctctacattttaatttttgcataatacctaataggcctcaaatagagtttacctctcttcttcctcaacaagagaaaccccatttttatacttgcgtaatgagttacttctctctactctacagactaaagaaaaagttgtaaataatgtatgtttgttttaatatacacatttaaaaagccatgctctgaaaatgaaaatattgctctccagtcctctgcttctatatacaaaaatgtgagtttaatttccaatttattaattcatttttgaaaatacattaattgattcagtgatgtctatccatacaagcaatttgactcatcaactcagtaaagtgaatacaaacacacatcaaatccattagaataatttatttttttcactgaattgattgtaatttatctgaactcaatgacaaatctttcaaaatatgtgaaaaccctgttattatgtacagccataattgtaactggtctaattttctgggctatgacggtttcacacaaagagaaatattaacattccttccatttcaaattgacgattcaaccacatattacttttaatcatatcactgttaaaattttcattgaaattgcaaaaaaatcataagactattgttgaaaacagtattgcacgtgttcagttaaccatatttcactatttcaaagaatcacacttgaaaaactcctgtagcatttatcatctagaaatctctgtgagccatgatttttacatatttccagtaaaataattatttagatgacaaaaatacctctaggcctaagtttcctaaaatatcttgtgaattgatattacatataggagagagagaaagagttattgagatcatcttctctaaatcactgtgttaaaaaaatcaaataatggttaaagaaaatttggtacactttcagggtgtattcctaagcattctaactgtttgaaaagtgacaatgttaacaatcctatggtttggctgtgtcccctcccaaatctcttcttgaattgtaaatcccacaattcccacctatcgtgggacaaatctggtgggaggtaattgaatcatgtgggtgggtctttcccatgctgttctcctgatagtaagtcccacaagatctgatggttttaaaaatgggatttttccctgcacaagttctctctcatgtgcgtgcacccactctttctctctctctgtctctcatgcctgccgtcatccatgtaaaatgtgacttgctcctccttgccttcctccatgattgtgaggtctccccagccatctggaactgtaaatccattaaatctctttttcttcctagtcttgggtctgtctttatcagcagcatgaaaatggactaatacagtacaacaatcatatggtaatgttttacagactgcttgatctcttgagaatgcataaccccaaactagtttattttttgtttgctttgggaaaacataagttaactcaagaatatattccagtctttatgttactaaaacattgtaatagtgtttttatcaatgatgccgaggtcactgctctacaaagattaaagaaacttaccatcaaacacttccagtgcatcaaactgcttttcactttgaaatgtgtccacaaagatggtaatgttgtagtttggttccactttaatactccaagagcaagtctgggagttaaaataattacccggataccctggactgagaatgactcccgatgatccagtccggacttcatttgctgggcattgtgctggagagaaaagtaccagcaaaagtttgctttaataaaatgattccaactgcaataggatagtttctatccctgtataaacaagtcaatgaaaggaaaaagcaatcttattgagctctggccaaatttaataccgaatgcaaacacagagggagggcaacattgaataatcatgagaattgtgcatctttctctttgcagttctctacactcagcctgcacactcctttggcccctgcatctcccacacaccttaatttggggcagatgcatcctggatttcatcatacaatgcaagatttcctaactctactacaaagaagaacctcaccatttcaaaagagtattacagaaatacagtgaaatgttatgcaataagaaaagaaaactcatatttattttggctttaaatatacagtaggcccccttacccctggggatacattccaagagccctagtgatgcctgatgctgcagatggtccagaatcctacgtcgtttctggtgcaatcacatcatacagggcaatggatatactggacaaagctgggattcatgtcctgggtgagacatagcccggggatgatgacagatttcatcaggctattcagaacagtgcaaaattttaaatgtgttgttatttctggaatttttcatttaatattttcagactgtgcttgatcacaggtaactgaaattgcagaatggaaaacctcggatcgggggtggggggaactactgtacttagcatagtaatatttaaacgttcgatgtgattgctcgggaccctgggaagaggaagaattagagacctggtctcaatcccacatgggacatctcagcaggagccctgattcctaagggatgaattaattgtaaatgtatcatgaagatactatggatacatcgtatcttttctcctcttgctttttgaaaaattattattcaactacttccagtttaatcaacataaaaacaatctgcagagatctggacatgcaaagcaaaacactagagtctcctaattagtaatttctctcatcactgaattatcttccagaaacagtttgtgtataaaactattaagggaaatttttttctattactggtaatggttcaaaaataaaaaatgtatatcaaaattacttgtagagtgttaagagttctatagttaatcaccttttccttaatgaaaaagagcttttgttaaatttatttattgagttatcgccttttaattagttaaatgtgtgctatttatacatacatttcaagatagaagcttttcaaacagatgagcgaagcttatgatatgtgtttttattcaagtaactgccttttgaaaagtaatttatttcctattttcttccatttatcttagcattctaattaacatatattttaaaatttagaaaatgtttagacataagaccaccaatcataaaacatttcatagaactctttaaataacatatattttaggtgagattttaaaaatacttacaatgataaattaatggcaataatataaactaaaataatcctaatcagaacacacagattgaaacaactgagttaaaggtctaattttcttctgtgatggtgacctcatcgctttgtaaaatacacgatgcccattcaaagttaatgtgatattttaagaaagaaaaaataatgaaattagggtccgtgcctgtgtatatctgtgcaggctaggacctcaagttttagaagctccacagacccgccttgactttgcaataacaaccagggctttccttggctctgacgtgtaagtacagagtaataatagctccccctcagggttttaattagagccaatatacacaatttttttttttttaaatctaaagcactatgtgggcagaaactgttgtaaggactagggatgattacaccacatgcctaccttttcataactgttagggaccaaccgccccaaaaagcttctcggtactgccgacactccccccaaacccctctgtactgcccacctctccccttaatgccctgcaactcttctccgtgccgttcacccttcccccaagcctctttacatttctaagccttatccaagcgctgcagtgaagccagcagacttcactcatcagaccttactacaataagcaaaccgcaattacaaaccatccagaccacacagagggaggtcgtgggaagcataaataaactttacctacaccctcctgtaagttccttcatctagctactgccataaacgtcacaagataatatatggcaaagttaaccaacaaacaaccccagggtccctctcccccatataaacccctcattttgtaagctcagggctgcctcttctgtctgtggtggagcagatggcaggttcaataaacttattcacctgactttgggtctattcatccttctctaggctgaccttatactaacaaaaaaatgctaccagagggcgtttcattttgtgggattacacttgaaaaacagttagccaatctctctaccctgcatttttatgaggactgagattttataactgcagctatagttatcagttgacattggaacttcaggccatctggaagtaagaaacctttactgagttgctaaaatccacctgaaaacctattcgcacatcctggggtttgacagcagtgcaatgatctaacccagaagcagcattttaagcatagccattcttattcctttcatatttgaaatgctgattttgtttcttaggaaagacaaaatgaaaatataaacaacttgttatataattcccactagtttacagaggactctcagtttctacaattctctccaaccaaagaggtagcagataatttgtagagaatttgtaccatttttcatttgtatcatttatcatttgtatcatttttcttaaaatacttagcaatacttttttcagtcatacatattgttttcaaaattcatgtggggttttttggtgttttgaggtttggttttgttttttaacttgtttgtttgtttgagatagggtctcactctgtcacccaagccaggctggagggcagtggcaggatcacggctcactgcagccttgacctcccaggctcaaacaatcctcccacctcagctgcccgagtagctgggactacaggcgcacaccacccctcctggctaatttttgtatttttattttagaaatgttgttttgccattttgcccaggctggtctccaactcctgggctcaagcaatccttccacctcaacctccaccatgctcggcctaagaagcatttggaggtgtttacccatgagcgaaagtgatttgttttcttgtgtttcttctgctctttcatatggaaccactccttctcctcagtgttataaactgttgcttagagcaatactcagttggagtgggagagctgaaagggaccgcagtgcggtcctatagctgagatgtttatttcttagcagcaatcacacattagaaaacaactgtgtctccacttgggaatctgggaaacctctcaccataggggagcacctgtcaaaaacacacgtgaaagcttgcctctctcagacatcacctgcgcctcgagttatgatccttctgcacaatgttagtgccccagattgtttttaaagaaaaataaaatgtgaggcttaaaacccaaagcatcttattcaacgcatctcataggccttcagcaaaactaatagcagatgaggattagtactctaggattaatagcataaattgggatttatgagtaactaagattattcttaaaagcacctataggtatgacagaattggagaaggtgagccctctgtgaactagggaaaaggctgccccagagcccttgtgatgcctgctattatccagcacatatagaaggaagctggagctgggcagcggcggtttttatgtcgcctccatctgctgctttcgaatgatcattatcagaaggtcactgaatctccttaatgttcactgaatacgtatggtgttttttttttttttttctaaagaaatgaatattctaaaaactattgaaggatcccccaaggtccacaggatgaagaaacctgacgttgaagacctttaaagtcaggtcctagtctagctttccagcctgatttaatttaccacctcttcccccaaaacaccctgagagcaagcagtaggaagccatctcctcctttttcctcaacgccacaccctcctttgtgtttccaaacctttgttattaattctcttcactttttgaaatgcctctctttccttaacaggagaaaagccacttctgtgatgtctcttactcaggtttttctacattaagatgagtgtctagcacagtaatatctccatataaggctgactactttttttttgagacggagtctcgctctgacgcccaggctggagtgcaatgacacgatctcagctcactgcaagctccacctccggggttcacaccattctcctgcctcagcctccggagtagctgggactacaggggcccacaaccatgcctggctaatttttttttgtatttttagtagagataggttttcaccatgttacccaggatggtctcgatctcctgaccttgtgatccgctcccctcagcctcccaaagtaataggattataggcatgagccaccgcatccgaccaatcctgactttcaaagaacaatgcactctccttgtttccctaaaattggtgataattttgtttctttctttttctttttttttttttttttttttagacagagtcttgctctgtcgctcaggctggagtgcagtgacgtgatctcagctcactgcaacctccacatgcggggttcaagcaattctccagcctcagcctccagagcagctgggattacagatgtctgccaccacatctggctaatttttgtatttttagtagagacagcgtttcaccatgttggccaggctggtgtcgaactcctgacctcaggtgatcctcccacctcggcctccaaaagtgctgggatggtgataagtttcaaagcacaacttctaaaagtgtggttatgacatttgaagaagacagactaatagctaacgtaatttttctgaagaatttattgggagatgggcccccacttgagcacaatcgaatcaatcaaatagtagaaaagtacttaaagaaagatgataattaagtgattcagtgattaaggatttggtaaaagacatctagggtcttatttcctgtttgttttcaaatgatgagttgtttagagaatgacagctaagatcactctccggttgttttaaacaaattgactcgtgacttgaaagagaagagaactaggttatcctgttcgcctcctgaggtgtggagtggggcttgggaaacttcagcgtgagtaaaagtcggcaaattttgtctgcagaatgctccctgtaactgtctgtgacaaatgaggaaatttagagaataacgctcatgttgtgttgatttagacatgtgccacttaaagatggggacaggctgggagaaatgcatctttaggggatcatgtcatcatgcaaagataacagcatgcacttctgagggaggccactctcaccaatgcaggcctccataacaactgtttccatactaacggagtgtttcagttacatattaaaagctgaaagagccagcgcctttatacaaagcctggaacggagtgtttccgttaaatattaaaagctgtaagagccagcgcctttatacaaagcctggaaggtaacaaagagttttccctaggcttctcctgggccttgaagcatgacaagataacaaaagaattcttaacaggaggacccttttagaattcaacgagttttattagcggtctgaagaaactccccaggcctccacaaacaagtttattggggtctaaaggagctccccaaacctttgtgatttagcgggagacaaaacaagactaatcaccccagcacctggacccatttagattcagtaaacttactgaggctccagaggaaggtcttcagcactcagaccttagctgtagattttaaaaagttaatcacttatgtctttaaataaatacacacttacacatagacatatagctaaggaggtacataagctctaaaaaactttgtaattttgagttggtctggcgataatttccaggccttctccctgtaaccagttatagaaataaaaactctcttcctcctcagtttatctgcatctcgttattgggacatgaaaaatagcagccccaccttcagtttggtccaggaacacttaaacacacccagatggtacagcctgctacacaattaagccatatggtgtagcctattgctcccaaaccacacacctgcacagtatgagactgtactgaagactgtaggcaactggaacacaagggtaagcattctcacatctgaactcatctcaacattgaaaaggtaatgcgtggccccgtagtactgcaactgctagacgtcactcggtggtaggaattttcagcttcattataatcttacaggaccacatttatctacacggtctgtcacggttcaaaacgtcatgcagtgcgtgattattctctgctcttggcttgtcatgaattaaacgtcatttaaataagaacttggttcatctggagaggacaccctaatcaaattccttttttttttaaaaaaaaaaaatgatgtagttttgctcttgttgcccaggctggagtgcaatggcacaatcttggctcactgcaacctctgcctcccaggttccagtgattctcctgcctcagcctcccaagtagctgggattacaggcacgtgccaccacacgcagctaattttgtattttcagtagacacggggtttcttcatgttggtcacggtggtcttgaactcctaacctcaggtgatctgcccacctcggcctcccaaagttctgggattacaggcatgagccactgtccctgaccaaaattccctgtttttagagcagcacatttgatacatacgtatgcctttcttctcttctcagctaagatcacctttagttaaagtcttctattctgagaaacttgaggctttgtttgttgggattaaaatgtaccttaaaaatgtgaaggtttgcctgggttcatttccatatagaatggcagaagatgaacactttttatatccccccaccttgaggaaagaatccataaatagaccattgttgctcctggaagatggcacagacgttggctttcttctaagaagacagtgacttggatctcctgactttgcacccaatgcaatccccacttctaagtaaggcaacctagaggcacagattttgatgacttccacagcctacggtctgcttagcgtttaaacagacgagcaggccaagggtctggccctctgctcaggtagcggtttcctgtaatcaatagttctcatgtagatacaacttcaatgttaatattttttcaaaaaaaaaatctaagttattatggatatctgataataattcattccaaaatgtatgccaatttttcttcagatgtagaagactgtttctctctttcagggtgcctggaatcctgcctcattccagaatgagaatgcacaaagttatcagacttttttttttcttttctttttttttttttttgagacagagttttgctgtgtctcccaggctggagagcaatggcaagatctcggctcactgcaacctccacctcctgggttcaagcaattctcctgactcagccacctgagtagctggcattacaggcatgcgccaccacgcccagttaattttgtattttcagtagagacaggtttctccctgttggtcaggctggtctcgacctcccagcctcaggtgatccacccacctcggcctcacagaatgctgggattacaggcgtgcgccaccgcgcccggccagttatcagacctttgaagaggatccatgcacaggtgtgagcatctgcaaaaccactgcgaagtcgatacttttgcaaagaaaacttccatttacagggaaggcagttaacattataaaacactcaaaaagataaattcatttaatactcggtgagtctttacaacaatctcaaaaataaagcggataaatcatcctctgtgtgcacagtgcagggaagagtgacttgctcaaagctgcctgatggggtgactctggctccgggtcctgtcttcctaaatcgtgggcccttatagctgtgtcactcaccctaaggaatgacaatagttggattccttgaaagagccacaatgctcaaaagcactacatctgcacttcactatgattttgaagtcataaaaactattctaattaggaaagcttttggataggtgaactaatgatgtttcgacttacttgagcatttgagcttatgtaaagtttttcaagcctttttcattcaatgatacttgaaagtggtgtctattaatattttaaaagtaatctacttgtcttctaatagattaaatcaacagattcagcctcagtatcttgttctattattgtatattgtctatactcttgcacatggtctacatatgttaaacatatgtgagaaaaacttgagatgtgcatgtttcattttttataaatttacatcaaaatattaaacaccagctaattatatgcatgctgaggtatttatagcaaaacgaaatgatattcaaaatttgccttgaaatgcatcaaaaatatagcgtagcttaataaatggctagaaagataacagataggcatgtgataaaggaaatactttgtaagttttcatagcggaagctaggtggtatatattcaggtgttacattattcaggtattaaaattatttcaactttgccatgtttgaacatttacatgataaattgctgtgagaaacatgatttcttatttgatatggccttggtttattttctaggactagataaaagaaaaagcatcattagatatttctgttagcatgttagtttcattgcaatgggatcagagcacagattaagtgcaggctgggtacagtggctcatgcctgcaatcctagcaatctgggaagctgaggcaggtagatagctcgagtccagaagttcaagaccagcctgggtaacatgttgaaaacccatttctacaaaaaaaaaaaaaaaaatccaaaaattagccaggcatggtggtgcatgcatgtagtcccagttactcaggaggctgaggcaggaggatcacctgagaccagggaggttgaggctgtggtgagccatgattgcaccactgtactcccacctgggtgacagagtaagaccctatctccaagataaataaataaataataaacaaataaataagttcacatctatacaaagaaatgcagaccaatacaaacaatacaattttccatgttgaataagtttatgtagttttagtatcgaacagtgcataccttcacatgttgggagagaaccctcaaactgcaactgggaactgagcttgcaagtcagaatgtcggtccccaccaaggtgtacccggggtggcactggtacttcacaaaatctcctagaagagtcaatgcaacaaaccaggaaattgtgtgtgaccttctgagtgtgtgaaggtgtgacacatgtaggactacttaaatgaattaaatcaacttgcaaatctttttagaaactatgtctgtatttatttttagtcttttaaaaataataccgttttaagttcttaatttataaaaatgctctattaagcttagccgatattagtactgaaatgatgtggcagcttttcttccttgactgaggcatccgtgttggtttcccttccccagtgattgctgacgaaaagaaaaaaaaagtaaagtagaagctatggtttaagcaagactgtaaaatcaaatggctttacagcatccacagagactcatctctgaccttggtacttagcacaatgttccaattaactaagccagggtgaggacagcagaaattgggtcacgtagtttgaccagtggtctgaaacacagggcagagttttataactggggctgaaaaatcctgggttgcaataactataccataaacatatgccatcactgctttctcagtatgaccagaagagtattgaataaattagatcattaatgtaaaaagatacagcagaaatcctaaatatcatcactaaatattttctcttattatatcccagtttcaatgaaatgtcactgttatgtaatcatcctttcagccgcaaatgattcagatttttctcaagtgcatgaatgtgtccccctaactgaaagcaaatatctgcccaagtctgtctctgaatactttattaaaaactatgaactaccaaatgttgtagaggaaaaaaatgttcaaactgacatcaaaattcaaatggcaaaacaaaaaaaaatcatggtaatgaagagggacagacattttctatttgatacatgacctccgtataagttctcagcaatactttaaggatagtttgttctttgtttctgtttttgtttctctgacaaattactcattaacttgtctgagtaatgattacaatgagaagtgggtgtaaaaaaatgtcgtgctgaattcatggtattgtaatgaagaaagtattacctatttcgaaatcatcatcctcagtaagcatttctgcctgtggaaccgctgggggaggttgacatttcttgagctgaaatgctaaatgattaatggaaagaataataataattgcaattacacttgctgaataaacacaactattacaaaacattcatcttgcagttgttataatgcttaagtacacggactgaaatgtctctattcctgaatcatagctttataaaattcccaagcttcaaatgttcatattattatttagtgccaaaaaacagttaaagcccaaggaaaaaagtgtacaattattttttaaagtataccatttaaataaacacactttacagatgtttggaattctgcaagaatgactcaacagtcacaacctggctccctgtccatgtgcagatttgataacgtctgccctgtcccgtgtcctgaggaattctgtaggtggcagtgttcgtgagagataagcgattgattgacagatgttctacatatcgtttagagtgcattcccaggattattggaggtttgctttcacaccatttatagttacatgacatttgctataacaccttatcttgagacagggatgagtaaatctataaaaggtaccaaatctctttcaatggtcttcatcttagagtttcacttaggatacatgtatcttggaataaatccaagctggatacgatgtgaaataataaagacatcattaaacaaaaaaaggaccacaggaaacgctggcctccagtgcaaaagaatcatacacgccctcggctgaatcaagaaacttcagctggaaacaaggcgtgggacaacactgcaggaaacaccacatggaattctcagtcttaactaacggagtgaaaatcaactgaccgtggaaattgaggacaaagaagcctccatttgaaaagtcgctgtggaacttgagcaggacttggttggtggagctatacgccgtttcgagggctgtgttgccactgaaaactcccagctggggtgagttctgatcgggaccgtccctaggaaagacagaaagaggtggctggctaaggatatttacttctgagtgagatttatggaaactttggctaatgaattaatttttttaataaaagcaataaaacatatgcattctcaggatactgtgtttgtaaacatcaagatgttgaatgtccacaaagttgaggaaccctccagtctctgtctttcattaatgttccacaggcactcggcacttgtcaaatgtcaacactcaccggtgctggtggctcatgcctgtcatcccagcactttgggaggccaaggcaggcagatcacctgaggtcaggagtttgagaccagcctggccaacatggtgaaaccctgtctctactaaaattacaaaaattagctgggcctggtggcacgcacttgtagtcccagctactcggcaggctaaggcaggagaattgcttgaacccaggaggcgctggttccagtgagccaagatcgcgccactgcactccagctgtgcgacagggcaagactctgtctcaaaaagaaataaattaaaaaaataaaataaaaatgtcaacacctgtgagattttccattctaaatatggagcttaatctatggggcatggccaaccacagaatgctgttttgttttggttttaaaacggcagtttcattgtggtcaacctaatatttcaaattctgtttctcctcactctcacatccactgactctggtcgttgtcatcttagatgtctgatttacttccacaacctcaaagccagtctcctttcttgccctctgctactttatttcccacaaaatgagcccgtcattctgcagcccatatctggccttggagctctgcctgtcagagcccaggtgcatcctcactgccccaagaacaaagcccaaggccttcacatgcatttccaggtcctgccttacttgccctggctgctggcttctgctcctgctccccctgtgggctccaacaagagtgcagccacaccacacacaacacgcacacacacacacaacatacacaacacacacacagacaccacacacacaaacacacacgtaagccacacagacatacacaagccacacacaccacacagacacacccacagagacacacatcacacacccatacccaacccaacccacacccacaaacacacatccaatacatacacacacagatgcagacacacagacataattctgcctatttctaccatgtagcaaaacccacatgtactatgtgaaattgattccctatatctctggatttcgttggtgaatttcttctctagtatctaagaagtttattctaaatatgtgccttgtatataagtggcatatgtatgctaagtcagaattgttgatcacaattacagatattttgacttgagaggttctcataccaaacagcaatgtaatcgttgacagcttccgtctgtaacagggtgaagttgatgtaaactccgtgccctggaggcaccgtgatgagccaaatgcagtccttcaggatcggatactcatcaggaaagccaggggagtagatggtgccgttctgagaagttacgttgtacccacaaggggctgcaaaggaaaccaagaaaaaacaagcgccatacagctgattttagagagtagaaagctaaatatttgactccaaagtaccttagccaacatttttcctgatgggaaataggtgtgaaatatttctgaatcaccattttgtcaaaattactgccctaaaatctgaagaccttagaagaattatacgtctaagctaaattatctcagttttatttaatatattctccatatcttcaaaatccctttaggataaatttattcttctatgcctcaaataaaatccttagttaacacttgtgacctgctgataacccatctgagtgtccagcacaatgaattatggggaaagtattcataaatatgtaactgctttttctaactcacactgctagaccctatttataagccatctgaaagagtgtcatctaagtctacttgccttaaaacaaagacattatcaattctttacagatctatacctgaagaagtaagataatgcaatgtaagattatgtaagtggtgttttgcggaagcatttccagtttttactagtgttcaatgacttgaagaactaaaacaatacccaatttattttcatttttgttaagaaatttatatttattattttaatggcaattattttatttatggaaaatgacatgtccaaacactaatggaataacctgaaatatagtctttaatttaaatattcatatagtgcatcaaagtcataaaactttgaactctgaaatcaaaccaacagctaagaggtgtgagatgagtgttcacaactctcttgaacctcgaagggctgtcaaagatttgccacaaatggtatagaattcaggtagaggaaaaaggcccaaatacacaaacagataaacaaaaagaaaagtttagtaacaaatgagaatataccatgaggcgggatatgatacactgttgaactgcacagatgtgtattgatttgaaaagaacattggattgaacctggctggagatttggatcttttcatcagaagaagggactgtatgtagagactactttagaagttttactgcgtaattattactaagtgaggtttggagtcagacaaacctggatttgtaagctggagaagcaaattatccctgggagcctccacttctataaattctatgaggtcagggtctgcgatactcctgaagcttgtcatctctaaaatgggaccataggctgggcacggtggctcacttctgtaatcccagcactttgggagactgaggtgggtggatcacctgaggtcaggagtttgagaccagcctgaccaacatggggaaaccctaactctactaaaaatacaaaaatcagccaggcgtggtggtgcacgcctgtaatcccaagtacttggggggttgaggcaggagaattgcttcaatctgggaggcagagggtgtagtaagccgagattgtgccattgcactccagcatgggtgacagagtctctgtctctaaaaataataataataataatgggaccataaaccatgctgtccccataacaagctacttttgtctcctgttggcagtgcacttttcctcccctccagacgtcgagggagtgttcacatgcttttcttctatttttctgccaaggcaaacttgtctcttcctttaaaactcaactccttgtcaccgcttccttaaggtctttcctgcttgctccggctctagaggtccaggctctgctcacagagcacacggctcccacgagactgtcagcctctagcagacagggtctgcatctcctcccaccccagctgctacctcctttcaagagtccctactgtctagctcaggtcatgataaacaaattgataaattggtgaattagagaataaccagagagcactttaagagtgaactcatgaaaccaattaggctgaaaccctttacaggtgactccgtgctagtaatttagtgtggacttacaatgctaaggtttcccttttgcatttctgcttttctagttgaatcttgtagttacataaccacattatatatagtagcacccttcctgttgggaaaacaaaacaaaaagccatcgttcccacctcttaaagggcaaaagaaatgaggtggtgattttcttggtagaacacattcctgattccagtattatttatgccactgaatacctctataacattgagcaagtcagtgattcttgccatgatttatctatcaaattcaaataacaaatcttttcactcactcactcaacaagtatctactgagagtgggttatgtaccagtaagggtgcctgggatggagatgccatagtgaaccgtagagaccctgttgctgcctttgtaaaaagcttattgaatagtgatgaagagagatattaagcaaacactacagaagtttaaaattcaacgggtgcaagtgctgtgaaggaaaataacagacgctcatcatcacataagataacaatattctatccataagcacacaaaattctctcaaagcaaaatcctgttgccctcccactgggtagtccagagatagaaaaaaagaggaccctaagaatctggagtcaaaatttcctctctcatttcccctggcctgatctttatctacttccagaccgtctttatcctcgctgcagtggcatcaaaggcacgtttgcatttccccaagtggtggcgtctcactgagctccgcagagacgggggcctgtgatctgccactgcaggaagtgtgcgtgtctcggcaggaagcgtatcccccctgccttcctttccctgaaggcggggttcaaagtggagtctggactgagatcaaagaggaagctctgcgtggagcacagcaggtacctcccagctcctcacctgtctgcctgggagacactggtccaagccggaccaggaagacagacagctgaccatggcatcagcaactgaaagggatagagaggctacactccctccactctcaggagccatggagtaaagagacgcgcaggcatttccgtgctcatgaatacccggatgttcacgtgggagagagcgttgctgggcaagacagtgaaggagggaattgctcaagctatttgctcatgtatttttccaagaataagcacataaagataagaaagctacatattttgatccgattctagagctagcagtcgctgtgttgaaagtgatggcggtgatgtctaacttgaatgtcacgcccaatgggaaacatgcccaggtaccctggcgccactggcttcccccacaacgccactctctatcattgcctcaaataccacggaggcttcccttcgttcattgacatccctgagaagtgggaagggggtacttttggtgattcacacacacaaaagttatgggtatatgtgactgactcctgctcaggtgtgaagccacagctcgaagataccagaaaatcaactggggggttggcacaccttggcacaggagggcggaggtacaaggaaacatctctttattgtgctaccttttcctctctttatgcaatgtgactttctgtgaagagagatggataggcatattaagtgatattacatcaaattaaaattaaaacaggctggctgttatggctcatagctgtaattccagcactttggtaggcttagggaggaggatcatttgaccccaggagttcgagactagtctgggcaatacagggagatcccatctattaaaacaaacaaacaaacaaacaaacaaacaaaaaacattaattatccatgcatgcgagcacatgcctgtggtcctagccacttgggaggctgaagtaggaggattgcttgagcctggcaggtcaaggctacagtgagcagtgattgcaccactgcactccagcctgggcaacagcctgagactccatctcaaataaataaataaagtgaaaacaaaataatttaaattttaaaaccttgaacgtttgctaagagacttatcatttatagatggttttctctagtattatgttaagttttttgcctaaacaagaatatgaaagaaattccatattaaaaagctaataaatacacttggcataaatatgaatataaaaatataataaatatgttataatatatatattaatataaaaatatcttgactctcaatatatcgaagatactgaaagtttaatctcccctagtgtgtagagaaccagagttattcctgccatcatttttcttccttctgttactctggtttccttagaagcattttcagagaagaatccagagcgcactctgtcttggaaattgccggttggtaatggagattttaaagactgtatttgtgaatgcaggtaagaaaaataaggagacagagttgcattctttatagttatttttattctctattattgggaaagattattttctgtatttaccaatcagcttggtaaaccttaaatttaaaaaatatgtatgtaataatacattgtttagctgcttgcatttctcatgtcaattttgcaataaaattgttttctgcttacaaaatctgtcaaattcaaagaagctgttaacatacctatcacaacatattatttacactaataattatctctgtctgtgcaattccccactctacacatactaatgcatttaagtcaagtttattatgatagtgtttaagatttatttaatgcctaaaattatatttttatgcataaacatttcagtgttaaatgattaattaggtcagcaaaatattttaaattgttgaactatatttgtaagtgtgaatgcatatttaattagaaaattacatttaataagttaataaaccaaattctacttaatcatattttaacaattacaatccccccccccccttttttttttttgagatggagttttgctcttgtcacccaggctggagtgcaatggcgctatcttggctcactgcaacctccgccttctgcgttcaagtgattctcctgcctcagcctcccaggtagctgggattacaggtgcctgccaccacgcctggctaagttttgtatttttagtagagttggggttttgccatgttggccaggcttgtctcaaactcctgacctcaggtgatccacccacctcggtctcccaaagtgttgggattacaggcgtgagccactgtgcccggcctaaaacccccacctttttttaattttttaactgagacttctgtgtaattatgttactgacagaaaaataatgtcttcaatttctcagataactttcagagacatattctttcatttgtttactttcatagatatcataatttcagatcacagtttttcagataaatttatactatattaatttcataaagtagattcttatgcagcttaacatgtattttcagtatataaatacaaattgatttcatatatacttgtgaagactgatgccttgggatttagaattattttattaattatctaaactggccaatttttaataaagacatcgagaagttgtttaaagtatctgtgttttttctgaagttcttttcaagtctacagggctggacctttgaagatggtttttcagtacacttgacctatatagcaatcactgacctgaaatgataaaccactgtcaattaataaaatacatgttacatgaagatactgggttgtcagcagtgtttaccgctgtctctgggaaagactgaagtgccatataactgtaactaataggcgtttgaacagcctccgcattcttatgaagcaacgacttttttaagaaatataaactttcacaagtaaagcaccttttgcgttaaataacaccttttttaatatgaaaaggatattaaacacacattggatggttcttagaaaatcctttatataggtcctctaattgttttcaatatttatgataaacttttacatgaatcgtgcgtttcggtttctttattaggtttacgagtactggtaaaaatagaaatataatagtaaaaatgtttgtttagtaaagaacttggcatggatcagagagatatgtggcatcctcctggactctgccacatgtgtcttttccctggaatatattgacatatcccctccctgttaaaaccataatgacaagcatgatagttttagagatgtctctgagttcttctaatggagaatgaagcctcaggctggttttgggagtctgaaggggtttaggctttaaattcatgcagagtttagctaattctagatggtgttatataccatgttagaattaggaaaggtggcaggcatcactttaaattctatcaaaaaaggtagattttgttattttcacactgacaaaataattcgaagccagagcagttatttccatattgaaaaacaaagcttgagaaagcaataaaatcaaattaaatatttaattgtagttttttttaaatatcaagccagagtctaccatttacatatgaattcaaagtcttcacaccaaacttgcaaataagaagaggtttcaatcctgataatttcaaaagaatttatacatatatatgagtttctagaacggaaagtagacttaaagatttaaaaaatgttttaatgaaaaacagcccagataggttactgctatccttattttataaaattaattttaagtgctattttatatgtaattaaataaatattagattaagataaaatacttttaaaatgtggctaaagaattgtttgtagttattttttattttatttatttatttattttgagacagagtctcactctctcgcccaggctggagggcagtggcacgatctcagggcactgcaacctcagcctcctgggttcccgccattctcccacctcagcctctggagtagctgggactacaggtgcccaccaccacgcccagctaatttttttgtatttttagtagagacggtgtttcaccgtgttagccaggatggtcttgatctcctgatcttgtgatccgcccacctcagcctcccaaagtgtgtttgtagttatttttataataatacagaataggtaaatacagataaaaactgtgattttaaaagcctactgatatgcttcttttacttcttcagtagaaattaaagcacagccagatgtcttccccttttccccacaggatacaagtgcttagcatttcaaaggtccacggagttggtaatttcattattttttcattcaaaggtcctgtatgtatagtgtgagaatatcgggtttacagtaaattttctattgcatatgcattcttcctacacatagtatggatctatttattttaattagatattgaaaaaatgtcaaagtcatcataaaaatgaggcagtcacacagaagcattaaagtaaggattcctgctcagaaaaaggacgtctaaagagaccaggtcctctgttgcaccatcaaacgagaacttgcctccagcctctccgtagagcccctcttgcactattaaaccactctactattttctcctatggctacctgtacactgcgctctttcttacactgtttcttctacctggagtgttccacctccgagtagcaaaatgctatgtacctttcaaggcccactacaaaaatgagctcatttttctgaaatgcaaaatcaatatgaaattattataaaagctaaacaaaaagaaacaccaaggatcaaattaataagtaccctttttccctctggtcctacaatctgatataaccactgtaaagctgaacgctgctgacttcgcggagatttccctgatggcttcccaagcctgtgccatctccttccctgcagctcagtataccattcctcttgtgtttactattttgccatccttataatttccttggcaacaaggattgtttctttacttctaacttaacagcatgcgacatattccttaaatactaagtggagtgagtaaaacataatagattctcaacgaatatttattgaatacattaataaattactggatatgttcatttaatatttaatgtgctattatgcccatgaaacattaaatcgcccccatgcaaagtgatgaacttaccatcacatcttggaaaagggtagttccagtttctgttgatcccatgctgacaagtgaggacaggatggcctattagaatgtacccaggataacactcgaaagatactgattgccccacgctgtaatccgagttgatcatgtacccattctgaaatgggggtggatctggacagttctgtaattcataggctgaaagaaacaaacagacaaaataaagcttatatttgtgaggttaaattacttcggaatttgcaggagtgtcatcacatgtgactgcttgagatgaagttgttggataagtttaataaggtatattttctaagtagtcagttgccatccagaccaatataattattattagtagtagtagaatcataaccatatgcatttaataaatagtgtgtactttaaaaggaaagtagcacataccaaaagtaaattttataatgcttaccttggaaaaaaggcatatgatgtaaattatttaagaaagtaatacaggctgggagcggtggctcacgcctgtaatcccagcactctgggaggccgaggcgggaggatcacgaggtcaggagatcaagaccatcctggctaacacagtaaaatcctgtctctactaaaaatacaaaaagttagcctggcgtggtggcgggcgcctgtagtcccagctactcaggaggctgaggcgggagaatggcgtgaacctgggaggtgaagtttgcagtgagccgagatcttgccactgcgctccagcccgggcgacagagcaagactctgtcccccgccccaaaaaaaaggaaatgcaagtaataataaaaggagcctacaaaaaatgttgggtgaacatatacctaataattcccttttattttaaataggaaatatactaccagtctgagtactcctaactggaaaatatgtcgttatttggtttaactatacaaatataacaggaaaatccattgcagtttttttagtctttttctaaaaaaaaaaaaaaaaaaaaaaaaaaaacactgtataatccctaagctgacaactactatcagtacaattttttataacatgatttattgtgctttatcattcagtctttatgttccctagaataaactccaggtaagacaagagataataaatgtttgcagtctgtgtggtttaaacatttactcattaatgagtaagaattaactaatccataaatcaggtatcatctgatactgtaattttaaagctaaatgagcctctcgcccactctgggaagagggcgtgagtactcaatgcagtagaagccctctctagcatctttgaatatttaggcacacctttgtccataaaggcagttcccatgagactgggaacctgctcctaatgcagcagcaaagccacaccatgcagcaccagttctgggggaacctccgccctgccatgtaattctgctgaaaccaaccctcagcgccaggcaacacaatgagtttcaaaatagcatgaggtcaccggtcactgtcctcacaatcaactgaaaatcaagtcataaaataaagtctccgagcttctgcagaggggccttttctgtggagaatgaagtgaaatggaaatttcaattttatgtgtaaattccttaaccattgacaatattggagtgagcctgtagtttggaaacttgtaaacaaatgctggaaaaggaaacagtatattattatgacaggtgtttcccagaattctagacttttttgtttctgtgttcaggacctgagaaaaagagaggtgggccagaaagaagataggacagggcagaggggccagcagacaggggatgggaacacaaagagcttgatgcgggattactcagggattagatttaagaggcagctaaggctcagaatatgaatcagtctgtgttttatattaaagcaattggacatcaacataaagataatgtgagaacatatggaagacagcaaccaggcaacgcaatatgtgggcctacagcgtggccttggcgttcacaagattaatgtaagtgctgtttggagtttgtcttcattaacatttgccaaatgttaagcattccatagagccatgaggtttcgttattatccatagctttctcctatttaataaactaatgaaatggcattgttgcctctttaaaatgacaatgtgcaggctgggctcggtggctcatgcttgtaatcccagcattttgggaggccgaagcgggtggatcacaaggtcaagagattgagaccagcctgaacaacatggtgaaaccctgtctctactaaaaatacaaaaattagccagggggggtgaccggcacctgtaatcccagctacttgggaggctgaggcagaagaatcgcttaaacccaggagcagaaggttgcagtgagccgagatcacgccactgcactccagcctggcgacacagtgagactccatcacaaataaataaataacaatatgcaatgctagtgagtcatttcagtaactcaatgatggcaacattatttgccacaactgtttgggaaagtcattagaatagggccataaaaaatcagttgtaatattaaacctagtaatacatttacagaaatctctattatgagcataatttctaagcagaaaaaggtgaatgtttaaagatgttcattgcagcattatttacactacagaaatccaaacaacaacaaaaaaaaaatagggagagactcataaatgccagtgatgaaatgtcatatctttcaatagtcacagattgtatagatttctgtgtatttatttatattttcagtattgtaagcatactatgcagttgacaacagcttcctgtggttaagccctgactatagtcagcaggttaaaaaaaatcctttatttaacctttcagcatcccttggttttaattattttcatttatgcaatgatatgtctctgaacaagagtcagagacgcagcagaaaaatgattgagaacaagaaaaatcgagatcagaggacacatagtggcaaaagcatcttgagataattcctggcattggctcccccagggacgagaagtgggaagaacactatgtgagacaaattcctcccagagcgggagaggaggaaacttcacctggagggaagcgctgggcagcctctgaaacccagaaacccactggattatgtcgctcattactaacagagctttgggggctccctaagagctccagacatcacctcttttacctactatctaaagatgtaaaaggctgggagcagtgactcatgcctgtggtcccagttactagggaggctggggcaggaggactgcttaaggccaggagtcgaatgctgcagtgagctatgatcataccactgcactccagcctgggtgacagagcaggatcctgtctcataaaaagcaagcagacaaacaaacaaaaaacagatacaaaggagtattgcctaattaacaagatcagtgtgaatatcaagtaatttatatgataaaacttaataaactgtcataagttcaaataaagttattacattttatttataatgcacctaaatattatagagaattagctgtattttaggttggtgaaaatgtaattgcggtttttgccattactttcaatggcaaaaacctcaattgcctttacaccaacctaatgtatatcgataatatgaaattagaaacagtgtttgaaaatgagtattctgattaactcagtgctatcttttgagatgtaatctttataactcaatatttacaagctttatatacagaaaatccaagataaattactagttatagaatgaatgcttttaccccataaatgtatacaattataatttgccaattaaaaatgttattactttaaaaatatgtaattacaaataaaaaaatgaatgaatgttccagtgctgctttctggtaaagctacattataccatggaactactgcgttgattagagacactctacaaagatttactatagatcaataaaccttataagcacaattgctattaataaagtttgcaaaataaaaaatatttttaactcacaattttgtgaaaatggaatttgcagttgacgtggtatggctgtgtccccacccaaatctcaacttgaattgtatctcccagaattcccaaatgttgtgaatgtgggagggacccaggggaggtaattgcatcagagggtccaatcaatctcatactattctcgtgatagtgaatgagtctcacgagagctgatgcttttatcaggggtttccacttttgcttctttctcattttctcttgctgccgccatgtaagaagtgcctttcacctcccaccatgattctcagctcccccgaccccagccatgtggaactgtaagtccatttcaacctctttttcttcccagtcttgggtaggtctttatcagcagcgtgaaaatggactaatataacagtccaccatacagtagctacattatatacaatagtgtttctcagttgtttttgtgtctgataagtagaatattggactgttggaatcttttacatcatacttggcttcaaggaaaaacttctccaggtgttcgaaggaagaatattcaaacccctatgaaacaattatgtcttaaaggacgtagctcaaaggctacagtggcgtgtccctcatgattgattgtttttgttgttatcacctatttgaaaaactagatgcttagaaatctaagctgataaatgtagggacagggaacattaaaacagaaagccaggccaaatcagcatctctctctttctctgacacacacacccctcatctgcattcccccatcgtgtggctccctgggccaacctgtcaaatgcatagcaaggccaccgctgcctctgccagggaccactccaggctgaagtccacaaaaacagccttttcttgaaagccactgccaaatggcctagaaaacatccacagtgcctggaatgcctcctcccaatactgctatttggacctaaaattgctttagagacccatgctcacaaaaaagaatgaataattccacactgagtttcaactatcaacacatttccttctttattattctcttttagaatgaaatcagcaattcatttctcattcttgttttgctttaaacgtaataaactctcttggaaaaatgagtcctactgtacagcaaatatgaacgctaataaaacgttaagaaaaaaaaacatggaaagctgattgctggtttctagaggaggagaagcaaataaaactagattcaatagaacctcatcttcattagaagatttcatccacgaattagcagtgccttggaagtatacaagcctcaattaccagaatacaatattaacaagttaatggttcataggtactcctggtgaaccttcacttaaaacagcgtttaacagagacacacacacatttacaacacaggagtgttaatagtatgtaaggcattgcattgccttagtttggctgtgtagtctttcgggtgacttaagaagtacaattaagttcttttttgggataggtaaaactagtgttgaaggctctagcgcccttctgctcatgaaaataacctctatgaaaaacaccgaaataggacatttgaagttgtaattaaagattctaagcccaatggctgcgggctactctaatcactgaaaaaaattgttgttgtttttttttcttttctcaatggcaacaaaacaattatcctgtgtgcgtgtggggaggggggagcagattagcccatatgggcagtacagtggttttcattattcatttattgagtgaaataaagattatttattgactctactctgttataaatgctagttataaatggaaactagaaatgcgtcttactctggtgaatttaggcaaattaaagcatagatgattgtataaaagaattgtaagttgcataaattattattaaaaaataaaaagtggattgaagtaaagaaaatataaaacctggttaaggttatgcagtagtggtcaaaattgttttgttgaagaaatgacgtttaaattaagatctaagtaggaaaatggtgcagatcaggaaaagaccaagaaaggcaggcttttcagccaaaggaaatagtatgtgttctaaacatagaaagagttcagtgtctgggataaggggagagtttcagaagagagatgacctctgcagccccttctcctaaagtgtgtgccccttttcacactctcctaaagtgtgtgccccttttcacactctcgccacctcctaagtggagacgaagtagtcgtcaaattgttcagaccacaggacgttcattagaacacattttataagtggacacagacatattataaaaacccaggacccattttttcacctgataaatcccatctgccagtcaacatcataatgatgacaatgatgattcaaaacccatggctcatttcagaattatctcaagaatttaaaatgccaattagtttctttttctattgtaaactatacactaagtaagagtatcactaagtaagagcatcagttacactattttttggtctttgttccaaatgtcttgttaaactgagtacttaactacttaaatattaataccgatattccctcaaacttttgatgtataaagtcatattctctcttttctcaaatgtcttttccaaacttggattcactgtcacacttcacacaataaggtataaaggactatattaggagtctgaatggaaataactaaaaataagtcatgaagataattcctgagtatgctgaagaattttggaaggatcctgttgcatcctgtttagtgtgagtgtgatgggtttcatagtgcctgtgctggcttcttgcaggtgcctctgaaggacttgcaatgcatcacagtgccaggccacacaggtgtgagagggcgaaggaggcgtcaatctgctgtcagaaccctcatcacgcatggccttcttgctctgtacccatcataaaagcattcaccctcataaatgggttgtaaacatataaaaagttttaatttaagaaagaaagtcatcaagtgagagaaaaagaaaaaaagatcacttcagtggaatttgataaagaagttaccttctagggtaaagggtggtaaaagccacgattatcaaacaaattctgattcagctgaaggtcacaacttctgcatccccatactgggcaattcctaaagacttctgaaggcattctctctattagttctataagagttgttgtattatctgtcattaaaaagttgaattaaggccaggtgccgtggctcatgcctgtaatcccagcactttgggaggccgaggtgggcagattacctgagatcaggagtttgaaaccagcctggccaacatggtgaaatcctatctctactaaaattccaaaaattagctgggcgtggtagcagatgcctgtaaccccagctactcgggaggctgaggcaggagaatcacctcaacccaggaggcagaggttgcagtgagctgagatcgtgccactgcactccagcatgggtgacagagttagactccacctcaaaaaaagaaaaaagttgaattagagaatcatcaacacatgaagaaatctacctcggcagtacatacatgagccttgaagtagttttgcaaaataggtgaggcaccctggtgtgacctgagttcagcctggttgtgccaatacggggacttgaacattccacttaatcccaggaggctcatttcttcattcatgaaaggagactaaatatacccatctatacaagggccacagaattaaatgggatgctaaaagaaatgaatcagtgttggcatatattagttcagtaaagcttagtcttgatggaaagaattgtctagtttctttgataaaatatttctcattaatcaaggcaaagccctcgagcaactgctctgatggagacagacccaggaggaggctactgcttctggtggtgggaattagggtgaatcactctaagaaaagggcattgctacagagaatagggctgcagtttacatcaaggtgtacactgaagactttgaagccccgcttgagtcctcagcttccctatcaatgaaaagatccatctggggtctcagtagcatgtcagccatgaatggtagtccacagaatttcccaagtgcacacatacagaagctcaccaatttcccatatctatcggctattctaaacttctgggatagcatatcactctttctttataaccaaggatatcaccctggttctcaactctaagacatattttctgcctaattatgctccatttgttctcttagctcctagtcccagcacctgcttatgaagccaaccaaactgttgcaaaagttgtcagagttttgggcctcgctgagactacaggcttatacatcaatgcttcgggaggaccagcctgcacatgaaacgtgctccctgcattgcaagagaggcttgcagcaagtggaatgtggaaatctgaaggtgccttcacctaggagacgggtctactgatgcacgctgagaacgtcagcttttggttcagaggaatggatcatttaaaggagaaggtgagagtgttgcttttgctttcagaaaacccatacaagaaggagtagatgcctgtgatctgcagggagaacatccgtcaacaatgaagattcaggtcctagtttctaagagtcttgtccacaaactaaggggaatcttagccttttctgtctcgtacatggttgccctagcggggatggggattgctacaactctttggggtcactgttggaagcactttcatgcaaaagaggcatctttgtaaagccttaggttgaaagctcaattcactcatgcagacgggtaaaaacagagactgagtaagcacccttgccctgttcccctaattactcaaagtcgctcagaatcccccgttgaaaggaaaaggaatgatgcagttttagaagcatatcaactttatgtacaaattatggtttgtatacaagcaacagtttgcatgctcacataattcagaatgaattgttcagatgttcattgtgcctggaggtggcttaattgcttgttcttctaaaggggaaaaattggtataacaaactatagcctattttctaagaaaatcatttcacataaaattcagcagttttatgattgtgatgaagaataaacagatttaacacattcgattatctttaaaaatggtgtttggcacacatagcaaaaggaagaagaaaaacagtggaactttgaaaataaaagacatttttacttgctatgcctaaagcattaaaattatctttgagattttggcattgaataagttttctttcccaaaaaagtttatgcattagaatgcagcaatatgctttataacacagaaaagaaagagaggaagatactaaagaacaaaggaaggaaaggagggagggaaggaatgagagggagggagggaggaatgaaggaaggaaggaaggaaggaaggaaggaaggaagggaaggaaagaaggaaggaaggaaagagggagggagggaaggaaagaagggagggagggagggacttaacttctccaaattgcaaaacctaaaagaaaaggaagtcactaaaatctttaacatggcaaaatttttatgagtattatgaaaatctaagtatcaataagcccaaggcaataccaacaaaagtaaaataacacagagaattttatcttttataaaggaatcctttgtttagatctgaaaaaaataactattattcacatcaagtttttaaatcataagtgcaacgagaccatgcagtaatccccctaatgtctattttcccgctaatatctagttagttgataaatatcttcatgctattatcaatttttcaattcttgacttagaaatagagtgcatggcttgattttaccaaagttcttaataagtcatttaacttcaagacagctacgtctatagtaacatctctgacctttacatggtcataaataaatgacaaactttaagaataaggtgtacagcacagacatcattgaaaatgacaagaattctctgtatgatttatgcatcttcttaggagttattaattataagcttagcttctaaatctcaagtagaacctaggaatgtttatttgacttacatatcagagttaagtgtcatcttatcaatttatcaattttataaaatggcaaacactgacaaactatctaattaagtgtcacctctgtcagatatgataccctacaagaaaataaaatagctcaaattcatgttctcatttatttgtattatttatttttatatctcagtgataggaaattaatggcgtacaataaaaaacatgttgtttcgagtttttgttttttttttaattgaaagtcctttcttctccttgacatctggcttggaatggggtgtcaagacatgggaaagcaggaccaatgtttccagatcctcctattgcaagagacaaagggaaagcagatctaagggtatctcacaaatcctttaaaagctgcgtgacaaacaatactagcatggagttaagtgtgaagcaaataaaacacttgcttagccaaccagatgcttgacctaggagaggacttatgctttctaacgctcaaaggccacggagtcaacatcaatgagcaagacagtaagaaactagaggaggccctgaagtcaggcccactttgccagggttctctcctacgtgggaatgcaggacaaatatttccagactctgctattgcaggagaaaaagggaaaggggatttatgggtatctcataaattacataacatggaattctaaatactgataattgatttttgtaaatattaaatattttgtgagtcaaccaaagcaattgtctgacctgtgctctagatgattcctacatgggctttttgcaggtttgcttgtttgtttatttatagaccattattacagattgaaataattggtagcttttggaactacatagacatggccttaataaccttacctgtaaaatatcaagagtaaaacacaaaaaactatggagctgggccgggttcagtggctcatgcctgtaatcccagcactttgggaggccgaggtgggtggatcacttgaggtcaggagttcaagaccagcctgcccaacatggtgaaaccttctctatactaaaagtacaaaaattagccaggcatggtgacacacacctgtaatcccagctactcagcaacaaaaccattttttaaaaaaaaactgtggagctgggccgggcggggtggctcatgtttgtaatcccagcactttgggaggctgaggcaggcaggtcacttgaggtcaggaattcaagaccagcctgcccaagatggtgaaaccctgtctctactaaaaatacaaaatttagccgggcatgttgacacacacctgtaatcccagctattcagcatgggagaatcacctgagcccggggggcggaggttgcagtgagccgagatcgcgccactgcactccagcctaaataacagagtgagactctgtcccaaaaaaaaaagaaaagaaaagttaaatgttgaatatggtattaagaatattcaaaatgtgggagacttgcaagtgcttggtgtcaactgagatacaccaattaattgacagttaatggtttatggcatataattatgttctatttttcttattggctcagatattaagatcatgctcattaaaaatggaaattaccatgtaatgagcaagtttaacatgatgatcacggaggaagtgtttgtattttaacaggatgtagttcactaggaatggggcaagggaggggacagttgagcaggaagatgggagagaagcacaacattcatcattcacattattcaaattgtacgtcgtgcatacagccagacgaggcgatgcaggtgtgttggagctgaaagcctcccgcccccaattcctggaagcctcttcactgcttcccctgctctactcttccctcgcttcccccaacccccatccacatacaattcattctctgcatgtaagcaacttctcatttgcttgagcttcttcagtgacatcacattgcacctagaaaacaacctgaatgcgtcacagccaaatccccaggccccctgacccggggaagccctctgaccttccgctcccagtgcaccagccttgttcctttctcttctctcaactcatcgggcttctctccacccagaactcttcctagcacgtgcagccatgtctccttccagtccttcaaatctcaatgccaccccagagagtggcagaccccaggcccccgctcacaacctaaacatcaccccaatcatttcctccacagcaggcaccactaacacagcttcagcctgggcacggctgcagcctctatggctgcaacttcaaatcaatgccctaaacatatgtttttgcctccagtctcactctatttgcaacaagtgtttctgtaacagtccatatctacattgtaccagattaggctcttaaaatgtgtctaaggtcattgtcattctcactttaaaatccgcgatagtttcttacggtcctccagcgttcataactgttttaatctgaactactttggcattctgggaagtctaataagtttctcaaactaatgtcttactgtataaaataaaatacataagattacaaaggaaaccagccattttaaaatattcctacaaaagtgcgataaagcaaaatttgtggcttaacattatgtatgttatttcactaaacaacacatggccaagtctaataactgaggcaacttcaaaccatggtgtagtaacattttgaaatatctgcacatgtatacatatgtaactaacctacacaatgtgcacatgtaccctaaaacttaaagtataataataaaagaaaaaaaagaaaaaataaataaataaaataaaataaaaaaagaaatatctgcactaaatgaaacaaagcaatggattatctatgatttggtgacaaagtcacaggttatgctaatactaattttttttttttttttttgacatggagtctcactctattgctcaggctaaagtgcagtggcgtgatctcttctcactgcaacatccatctcctgggttcaagcaattctcctgcctcagtctcttgagtagctgggattaaagttgcctgccaccatgcccagctactttttgtattttaagtagagacggggttttgccatgttggtcaggctggtcttgaactcctgacctcaggtgatccacccgcctcggcctcccaaaatgttgggattacaagcatgagccactgtgcccagcctgctaatactattttaatattattgcctgcctttaaaatgtaaggaaatgctaaatattaattaaagcttaaggggaaaaatacataatattgttatgtatatatttaccatctgagtaatagattccttgaattctatcctcaaggccccagaactattggtgtagagaactaaattcatggtcttaacaggggatgcaaattccttcacaatccaataccatcactccactggctcatgtccaaactcatccttcacctttggtagccataatgccacctctagtgtaagccagggttcacacgtggcctccaggttctgctcacgtggaactttctcagggaaagcctgctcagtgtgcctgctctgcgaggccacccagtgggttttaccctcagacctcagcagatatctcagtcacagagaggatcatgttggattttaattttgtaattgaaaatctagttttctattaaattatgacattattttacaaaacacccatgtatcttttttttttttaattcctagctcttggcacagaaattacattctcatgctagcctaatacatagacggccttcaaaaaaatttgacttaaaatacaacttaatgggtttagattacagagaccttcacaagttataaaatactacaataatgttttattcaaaaatggaaataattaaacactgatctatgaaagtaagctgtttgtcttcaaagtgtcactttgatgagttcagtctcatcagttctagatagtgttggggctcaggacaccaccccaaaatatgactctagaagaccagaatatgccaccccaaaacacacttctttggtatatttccaccagattattctgagaaactgcagatacaaaagtagttctgaatagctgcatcaagagggcagttgctttattacctgagcaattgtaatctgcataacaagacaactattcaccatatcattccttccctcactctctcctaatttgactccactactctggagaagcccaagctcttatttctttctggagctcaggagctacacaagctccaacttcttgccctttaatcctaggaaacaggaaacaggaaggttaggaacccactcccagccttctgtgctccaggaaatatctaagtgggaagaccctccttcgcccaggtctacaagaaggctgagggtgccgctccgttcacctgggaggaacctctcccacttggcctcatatgaggttagctgacttgcctgtcctatggatacactggaataaaaggcgtattagcccagctctgcgtgagcctgcatccttccccaggcccctggatgtcacccactgcagcgtgggccggcacacagcttctcctcagcgacctgggggaggccgacctggggccccttcttggctgctgctgtcctcctgggccttcttggctgctgctgtcccaatggggccccttcttggctgctgctgtcttcctgggtcccccgcctgctctttctatctcactgctctctcaacaggaggctactttccactaccctccggggatgccggctgacctgaggatccctcagagcctcccctttacaatcgtcctcagtctctcctgaaagagcttgggtctgtcttgtgttggatgccacttatagcagctgggggtgccttggcctcaggggaagagaggcgcccctgggagcagaaggcaatcctgttactgttacactggaaggctcacgtggacaccggcagacgagagtgaagcccctaacccaccaggaatgaaggggttctgaggagaaacctatggctgggctttagggctgcagtcaggaggggcgggcatagagcttagctctgggaaggggaggggtgagtgtgatcagaggtaggcgaagagacaggaggctgctggcaggagtgcccagcacctctcgctggctcaggacctacaggttggactcattccccctccatgaactgaccactgctcatgacactcactgccaggctgcgctgcagctgcctcacaagtcaaactgagaaagggtggcatggccttaaaggccggtcgaattcttgcaaagtcctagaaagtgctctgtcaggccgggcgcggtggctcacgcctgtaatctcagcactctgggaggccgaggcaggcagatcggatcatgaggtcaggagatggagaccagcctggccaatgtggtgaaaccctgtctccactaaaactacaaaaattagccaagcatggtggcaggcacctgcagtcccagctactcaggaggcaggagaatcacttgaaccagggagttagaggttgcagtgagccgagagtgtatcactgcactccagcctctcgacagagtgagactccatctcaaaaaaacaagaaaaaaaagagaaaaagaaaaacaaaagaaagaaaagaaagaaagagctctgccagtgtttgctgcacaaatcaagggcaagggttctgatgtccggaggccgtgatgttaggcagttcctgaaccatgaccctggatctgcaagaggcaatgcagccacagcggacatctggattccacggtcacaggcagcacctgcatccaaccacgaaggcatgcgctgcaagtccttgtggagaacgtttgactctcagggttttggcgaggctattttcacagccgtaaaacttgagaggagcaggcagatctgtcaggtgtcaggtccaaaacgaaaaactgtgatcggagttttcccacagtggccgttctgcagcttagggatggtcgagtggttttgcaacttgtgggagaaaattgttctttttaaactgacttcattaggtttaaacattctttcccctgttagtgcactgactaaatcgttggatttagaatccaaagacttcatttcccttccttctgctgaaatacaatagcttggctgacactactactttggtgtctagcagacttgattccaaatcatacttccacaggcagctgtgcacattttcacaatttgccaacctctctgagcctcatttttcttatctgtgaaatgtgcataacccttggaatttatgtggaaatcaggaagcatagagtgtggcgcagagtgagcacaccatacgtaacagttattattgtcattattattactgagacagggtctcactttgatgcccaggctggagtgcagtgatgtgatggcagctcattgcagccttgaactcccaagctcaggcagtcctcccacctcagcctcccaagtagccaggaccacgggtgtccaacaccacgcccagctaattttttgtagagacagggtctcaccatgttacccaggctggtcttgaactcctggccttgagcaatcttcccgccttggcttcccaaagtgctgcaatttatttttaatatagtaaaacaggggcaattagctcttccaaaccaactaataatacttctgcagaagcacatgaggacataagaaaacactaataaaaatctcttgcatacaaatacttcatttacatagagttttaatccaattatatcactgttccatggcatatgtattatgttgtttttccaggtaccttcttaaaggaactggcttcttcccctttaaaacatgctcttgagtgaagtctgctgatcacatttctgactctgtgaaccggcttcttcccctttaaaacatgctcttgagtgaagtctgctgatcacatttctgactctgtgaaccggcttcttcccctttaaaacacgctcttgagtgaagtctgctgatcacatttctgactctgtgaaccggcttcttcccctttaaaacacgctcttgagtgaagtctgctgatcacatttctgactctgtgaaccggcttcttcccctttaaaacatgctcttgagtgaagtctgctgatcacatttctgactctgtgacccaagttgacctaacacatagtctctgtccacctggcctcagtggctggacttagacacaagctggcccaccaagaaagtgttcccaaaatgtttagcaattgcagtaggagaagcagggtcctgtccttgctgagcagggtatggttagattggggacatatcatccatgtgtattagggcagaaaaagctatgaaaatcacaacaggggcaaaaagaattcaggtgtcactgaggcccaggctccagacatgccccagcccacacagctgtcaccttgcacttctttcctaaactagtttcattcagatttctatcatttacaatcaaagagggcagactcatggggaacatcctggatctttgtccccccctcatgcattacatctagccactaattgatggctcatctatggagtccgggttagtcctagaatatgatcaaggctctattttcacaattatatgtaacagtgatacacgtgtctatgtgttgcagagaggacaaccaagccttttttttttctttttttttttttgccccccgagatagagtttcgctctgtcacccagactggagtgcaatggcatgatctcggctcactacaaaccccggtctctggtctcccaggttcaagcgattctcctgcctcagcctcctgagaagttgggatcacaggcgctccccaccatgcccagctagtatttgtatttttagtagaaacggggtttcaccatgttggccaggctgatctccgactcctgacttcagctgatctacccacctcggcctcccaaagtgctgggattacagacatgagccaccgtgaccggctcatccctttcggatttctggtagcgacggaagagatgcagtgaatagaagagaagaacaccactgccattgataatatttttatatcagtggttatacccagggtacactcagagctgtttgcacacatgggtaggaccaccagtgcctgaggtaatccttggggtcatgtttcctgaaagtaactgtgaatcccaccatccctgggtaactgatacttctctggctgaaagcacaatcccttaaagaagccttctacaaaatccaacattaccaagactggacacatggtatttgtgccagtatctgcagtgacatgaattggctaaatttttttaaaaatttttttctatgtaatactgttttgaatttaaaaacatattttttttaaattttattattttaattgagagataataattgcacatattcatggggtacatagtgatgtttcaatacatataatctaagtgatcagatctgggtaattactacatctgtatgttcatcatctccagcctttatcatttctttgtggggggaatgttcaatatcctcctggctctgtgaaatgatgggacatattattgttgactacagtcaccctaaagggctagagaacactagaccttattcctcctatctagctacaattttttatcctttaaaagagttttgctagcaatatccgcaatgcgtagggactaaaaattgatttaatttaatgaggaagccggagcacagacctcaaacaaataaaggcaagccctgcacaggtgcttccgaaaatgtatatgcagcacggcagaaagtcccttagcatcagggggaataaacacctcaagtatggagctcacaggtgtgcactggggagcaattacaggtaaggcactgcgcttcctgctgagcgcggagcgaggtaaaacagaaatgaccgtcaccttcatgcagtgtattgttttcagtaaggcatcctttaaacatagaaatacagttgtcccttggcttttgcaggtgggttacaggaggaatataaaataatggtgcattttcataaaatctaagcacactctcttgtatacttgaagccatctctaaatttcttataatactgaacacaaagcaaatgccgtgtaaatagttgttattctgtatcgctcagggaacgatgataagaaaaagagtctgtgcatgttcagtggaaacacaaccatgtgttgtgtatttcagaatattctgatctctagtgcttgaatccacacatgcagaactcatggatgcagagggctgactgtatacaataaattcctgattttaaaaagtcccagggtatgcctgtcagtctaggttcatttatatggcattaacaacaatatcccggctgggcgcagtggctcatgcctgtaatcccagcactttgggaggatgaggagggcaaatgacctgaggtcaggagttcgagaccaacctggccaacatgggtgaaaccctgtctctactaaaaataaaaaaattagccaggcatggtggcgggtgcctgtaatcccagctacttgggaggctgaggcaggagaattgcttgaacctgggaggcagagggtgcagtgagctgagattgtgccactgcactccagcctggacaacagagtgggattccctctcgaaaacaaaaaaccatatcccatatctcagtgacttaaaataaggcagcttccttctggttccaggttgggatggcagggaactctactcctgtagatactcagggatccagatgactgagtggccattagagcaaactaaattttggctcttcagggttccatcccaagtgacattcactccaatttcatcactgaaagcaagtcacaccaccacacttcattttgaaggcacctctatcctgagtccagaagtagagagaatgggagagatttggtgggaatgctcgtgaccagcacacaagaagaagcacatcagaattcaagcttctgaatgaggagacctcccctggtcggagtactcagacattgcctcctgcagggtattacatagaaacagttccgaatgactaaccaaagagtgggagtggagatggaaagcattgcaggctgagattgctacacgtgcaagagctctgaggtagaaaggactgtggctgctggagatatttcagaggggcaagtgagaatcgagacagagaaagaaccacagcctgggagacagaaataagagcttagccagagagacagcagatccttatagatgttgaacgatttcctgaaaatctaagaaagcatggtaaacgctttcatcacaaaaggaataagtccggtctgccttttggaaagaagagagaagttggaagagtaaatctggaaagacatttaggagtttggccattttctaggagaaaggtctgagagcagttacggctactggtggtgacacagggaggcagccgcagattccaggaacactgcacctcacacttagtgagatgggggcactggaggataagctgggaagcaaaactgcgagctcagcttcgggcacatgtttcagtgcctgcgtcattcccagaggaggtggaaaacaaacattgtgtcctggcgcttgcagaagacttgagctggaggcacaggcacaagagttatcagctgtgaatggccatcatgggctttgaatccaggagtttgaatcacggaaagcataggatggaaatataggaggattccaacctcctatatagctaaagtcagttagaagtggtcaaggaagcaaagaaaataacaacttagccagagagatagcagaataacccagagattttctggcccctgaagccaagggaaaagggcgtcaagagaaatggtagccatgctggatgtcaccaggagacatgagaaaggaagtgtgcctccagggctagtgacattaacatctcctgcaatagaagatcttgtcgatagaagaccccatcatgttagacaccaggtaaatagataggagaagtgaaaaacaggtgtagaaattgagaatgtttacataagttttctggaactatgttttagaaattagaagctggaggaagacaagaggtccaaggtacattaaaattataaatagatatgtacgtgtgtatgtgtgtgtgtcgatgtgtgagagacagatctgagttatattcaagatgctattggggaaaatttcatggatagtagctgaaaatgcagaaatagaaaatattctctaaataatgtctctgaaatagtaggaagagaggtacctagagcataggatagattaccgttttttttctttcttttttcttttctttctttcttttttttttttttttagatggagtctccctctgtcacccagactggagtgcaatggtgtgatcttggctcactgcaacctccgcctcccgagttcaagtgattctcctgtctcagcctcctgagtagctgggattacaggcgcctgccatcatgtgccggctaattttggtatttttagtagagatgtggtttcaccatatcggccaggttggtctcaaactcctgacctcaggtgatcagcccgcctctgcatcccaaactgctgggattacaggcgtgaggccaccacacccagccccgattacccttaagtaggaggtacattctcttccattgaaaaagagagagagcagagaatagatgcacaggcaagcagatctgtatccattttgttgtgggaagttgcttcctctctgatgttctctctctctctctctctctgtctctctctctctgtttttctctctcgtgcttcaagtagggaatgattagtgagtgatactgtttgctaagtagtaagaaaataaagaaggggaacacagaaagagtgtttcatagaaaaatgctggcaatgtctagagacatattgctcactggtttagtctccagtttcctctcttttttgctcctacctagatttccagtttaacagacctcaatcctggaagtctgtgtctatattttatattttaggtgagactacacataataatgccaaagagttcatcataaaatactagcctctttcagtaataaatatcaaagccctgtttctaagcattctgtggaattagggaaacaagtgatttaactatattaaaaaaaaaaaaagttaggctctagatttaacgttttcaacctcatttgatctagcaatattcaaggaaaggccatacaaattattttgcatgaaattaaaatgttgaactttttcacatgtcaaaaatgctttgatgatgcaaacttttcttagagattgcatatttgaaggaataaaaaggataaagttcaatcactgattttttttctctttttgtggtgaaagttgaacatgaacaatgcaggtacccattatctgtgctaaggcaaggcatacatacctgagagacctacagacttactgccatatggatcaactccgtgcacaatgggactctctgtgtcctgaagggacgagagctcagagggacatagtgacaaatgggaaagctacatgatgatgagactccccagttgagcacacagttgactacggccatgggagagagtgtgtgcaggtgggatgggagtacaggtgaagcttaggtaacacccgtacctcatcatcccctgtgcgtctgtgaaaccgcctttacaaaattatacctgaggaaattatgacagtgaaagaaaccagacctaaccaactccatcttgcttctaacctttaagctgtccttgttcattcctggacatagattgaattaatttgggaaggaattcaattcctggtttgactctgaaacaaaattgatcatggccctttcccgaaaagacccccttcttgcctggggaccagtctgtctttgcaggactaacaaattacctgtaagattagacattatggtttaggggtcatgcagcctctggttccaagtctgaacctccccaaattgctcctgggatcacatcactattgtaaaacctaacatcagtgcttgagatatgttgcagaccctgcacctggtggatcagctgacaccacccaaaccggtaatctggcccaaccagttctgccatcgcactcgggaacagcagacagcaagaaaaactcacttccgccccctgtgattccatctccaacctgaccaatgagcactaccggcttcccaagcccctgcccgccaaattatctttttttttttttctgagatggagtctggctctgtcgcccaggctggagtgcagtggcgcgatctctcctcactgcaagctccgcctcccgggttcacgccactctcctgcctcagcctcccgagtagctgggactacaggcgcccgccactatgcccagctaatttttggtatttttagtagagacggggtttcaccgtgttagccaggatggtctcgatctcctgacctcgtgatccgcccgcctcggccttccaaagtgctgggattacaggcgtgagccaccgcgcccggccgccaaattatctttaaaaacttgaatccctgaatgctggggagactgaattgagtcacaataaaactccggtctcccacacatctggctctgcgtgaattactctttctccattgcaattcccgtcttgataaatcggctctgtctgggcagcagaaaaggcgaacccactggtggttccgtctgtgtccttacctctgttttcaaaaacaacaagtgttccactactaaccagaaaccaacattccaccaaaaaattattccactcgtacaagcttggaaccagttagggagatttatacttaaatacaatttacatgtaagaagtgtatttagatttgggtttcggttctcgttgttgttccataccttggtaagcaagtttaaatccttgccggttttgcgaatggtcactataaaagtggatgagggtttcatgcgttgtgctcagcagggccgcggggagatccgtgccgctaaattgtccaatcatggggctggtgtggtaaggtccattttgaatttcaaggaagtcatgattagcttcggtagaaaaattcagaaactgaatatgtgcacctatggaaaaacatgcaaacttaatgaaagttcatatcaaaatgtataaaatcaatgctcataaaaagggactgaagtgttagcagtctccccagacaatccctctctgtgagacagaaccatgccgtggaggacggcattcactgtggatgacagcaaaccctggctccatcttacctctgccactttttgccgcatggtctttttccatgacactcacgtccagaagtcaatttgtttgtgaaatatgaatattaccagcaccgtaccacagagctacacaggtggaatccttaggtaacaactagcacacacgcactcggggatgattttgtccggtgacttttacaattatgacaatcttaaatatgaagttgtgatcatctgttacatcacccaaaagctaactgatagctttatcaaggaaaaacaacaacaacaacaacaattttggttttaaaacatgccacagagttttttttgtttttattttgtgtttgtctgtttattttgtctgtttgccttgtcccacagttctatgcaaccaactttaaaggtggcttttactaactggacggtcataccatagcacaagtttattagtttagcaagcggtcattttctattgtgttacgtgtgcaaaacaaattattgatgtttgtgagaaacccaatctaatcaaccgcaccataactctcacaattaaatctaacagcctggcacagttgagaataccaaaagactgttcaaatgaccagtatctctgatatcatactcatctgtgaattaaataaactatggctgataatttaaaaggaaacaataaaaataattgagagttatttgcattgtggcattttttttgaaaacttatttgactactatgtcttagatattctaactcatttaagcaatttatatagaactccaaagacattagtctttgcataagtccatgcagttaagctgggccgtaaaacctaaactgagccaactaacagcagttgtagagtgttattccagtataaaagaaagctttactctgcatggttcttctgtttttgatagatgagaactttaaaaaaatttttgcatctaatatatttcctagattgggaaaattaaagataacacctacttgggttttcctacttcattggaagtgcataaaaatattcacacaaacacatccactcaggtgtcaaaggaaaacacagttgtcagagggcagtactttgtaaaaaggaagaaaaaagtccaagtgaaaaattgtagggaggaaacacctaaaatctctcaacaaaatttaaagtcatacaagaaaaacaatttcattaattatggagaaacttggcagggagaagcaaaagggtaaatagtgccctgcttggtgggcatcacgtagggccaacagtatgcctggggtccgatttgccaaccaagtttgctcccagcacagtaatcatcaccgtgctcataatttacaggcgagcaaactaaggctctgaaatgttagatgttctgtctcatgtcacacgggaaatggcagagtgaagtttaaccccgcactaacggacaaaggcctcactttttctggtttggtatgccaatagactagacaagagctgacagtctcatgatggtaaaaatattccactcttcttggagaaaatcagtttgtattatgttcaacctagattgaaagaggatgaattaaaaaaaatagaacgtgaaaaactgcaggatgtggctgaggagacaaaatacagaagaaaaagaaagatctttaataatttaagcaaaatttagaattctttttagaatgagtaactagattcatatcacgttgtccaagtctatagaccggtactacatcgccagtcaagaaaggacctgtgatggtcttggccattctaacatcgtctgctgtatataatcaaggtggagcaactctttaaatttacaacatttctgcaaatattcaaaaatgtcaaatactgctgtttgttgaacaaccaccagtgagctattgtttctaaattccagaaaatatttttgtttaaaaggaactcagaagtgagaaaaaaagaaagaaaaaaagggagagaaagaggcaacaagggggggggggagggagggagggagaaggggtaagggagggagggggtccaggggctcctgtgtcccttggtttggagctgtctcctctgcctgctgtgacagctgcgctcctggactgcccagccagtggcacatccagatctgcttgtccacttcccactactgagctaaaaacacagtttggcggtatgcccacaaatctaataagaatgaatcttgttactaataagtaaactagagtaaagagttgtgtgtgtgtgtgtgcatgcatgcatttgtgtgtctgtgtgcacgtgtgtttgtgtgactgccttatgaacattgaatccatgtgctccacagagttttatagacattgctcacattaatcccaatcaggcggaatcaagaagctgacccgagagtaacaaaaaacaacctgctgaattgctggcacttctacgtatgtccagagtaccagacagaaggaaaaccggggccagattggaacacttaatattttatggtagggaaatggctgagaatgtgctcacttcagatgcgcatatgcagacttcagatatatttatccagaaacacattttgaaattcatgaaccggcacagtcacgaaacataacaacttgcaaggggatcagggtgcaaagaaatggaggacatccaacgtctcaaaagtacaggatctagtgaaagtggtttgttactgatttggaattcagtttgaaaaggaaatggaattatgacaattataatattgtgagcaaaattaccattttaagcaggataaattatacagccacatatcaaactacctaatacatatcagaaaatagaacagagcccagctctaatctggcttaaaatagaattatctagctatctaattttcagcaaattgcatccagtttgacattgtaaagcccaaataaaaggattaaaataagcataacctggttatccttctattgtctcagagagtactaaagcatatatattatttcaataacaataaaaaatctgaatacttacctttggtggaacttacccagcactgtcttatcccattgggattacatattgaaaattaagtgccagtgacaagtcacctgcacagagaatttttgcctttggcattgacaaaactttgaatagtaatgtgaccatgatctcagagttaaaccctagtttttagttgatagaacctgtgaatattacttcctctgttttgcaccttctgtgtgtaataaaatatagcaaaagtgttaatacctatggaatttattgaacattctaaagaaccttttatattgtccctatgtttctagaaagtctgatggcatggtaattttggagagcattgtgtgcactattagtgcagtagattttaagtataaaagataatggggtaaggcagacagaaagcttcattgcatttctgttaactgtgcccttagacactctcaagaaaacggagaccgaaatcctgagttggttgagctctgccagagcatcacaaaacaacaagccaagtctgtgaaaaggaaagaaaatggcacacaactatcaggtttagctactagataagtaaactagaatttggtttaactattaaaaacagcacttaaataataccctatttcatgcatttacaatacttcaaaatagccctatgggactgatatattatattccctttaaaaataaggaaacaagtttcaaaaacatttgagtatcttgtgcaatcattggtaggactaagatttctactcagctaaactcagagcctaaaattgtgagcaaccacagcttatgctgccaactgcctcagttcttttggctagagttcccttggtcattttgagggacaggctgtgtgggtcactgtcccgcagtaggtcactgtcggttactgaggcagggtatagaaaacagctgtttctggaatgagtaattaggaaagccaggtaagatgatttccacatgatgccaaaccagttaatcgcttttgcttatttaaattgtggctcgatccatgggaatgggctctgggagtagagttaatcaaaataattatttgactaaactggcaactgcttaactcctggattagacaatcgatcaggcaatcccatgcttatccagttgtatgggaagattcataatacccaataaaatcctcccaaggtgaaaaacatcccatatatttttcttcaagaaggggcaataacgtcttatattccggataagtgttattactcagagtaactggaggagcaacgcttactggtaggacagctgtgccctgagaatccaaatcccaaaactgtcaatcaaggaaacagatatgtatgttcagatactagagatacaatctgaagcctagaaattacatttaagaatgttttgcaagaacgattttttcttttttcttttgtaattcactttggagttttgatttgtcatgctgtttgtttcatactcaataatcttctatctctattttcaacttcccaaaatctcatgatttctacatttttacacgaaagcaacttttcttaaataagtaatatttgtaagaatcttgtgaaaacctttgtgcatttctcatcttatttagattgaaagtgctcttctataaattggagaaacgcttcctgaaggagtctgactccagcatccaaggaactggagctgcttcgggaagatgccaaattcatttcctacttcagctggggcactgagtcagaatttaggaaagagaccacgggaagctacattgtaacagcacaaccgccattgaggcttcctgcacacagtaaaatttgagcaccctggggggcagtcattttccttgttacttagtgttgcaagtttaagtagacacaaattactataaatctgacactctcttagggtctaaggcaatcaagtttcccataacgtctgtttcttgttgaaatttccagtgatacttcaaaggaaatattgtttaacacagtttcccaaacctctgaaaaccgaggaggggagaggcagagtagtgatagcaatgcaccatttgcacttacaggaggagctggttaactggttacttgcgtgaactacctatcacatatatgccttttctcagcattaaggaagacaaatcttctggctattcttttgcaacctgatcaccaagatcaccctaacagcattatcctggtaagatattttttgtgtgacgtcagttgaaatacctgtctaccttctcaatctccctgcttgtcccattaggaaataggggacccttttctgagttgtaaccacaggaaatgttccagaatcactttatggtttgggtgttaataggaagcaacatgagagatcaaaaaggggagaaatcataattacaagataattgtggtcacctctgctatattcccattttgttttacgtaaaaacttctggagtgagtgcttcatttgtaagtgcagatgtctgagcttaaaccccaaacttacttcctcaaaatttccaagggtgtgatctgatattttcttatgattccggagattctgagaagagcttgctgacaagaataaggcaaggttcagagaaacaaaaatgagctgtgcagtgctgtgggtataaattaggaattgaacaggagaatctgactcagaggaaatcattcacatgcggccgaagtgtggtttgacatttgaaaacaagactcatgacgctgctttaaaactcatgtgcatagaacggagacttcaagttctggtagtggatattacaagggagaagacgcagaaattaaagaaggccatgaatacatagaactaatttacttaaatgtttttcactataaaacaatgtggggttgaaagctaggtagtaaaattttctcagattctgcaaattgctcgaaaatgatttaagccctagaaagaactcctaccaggggcatcataattccaaatgttgaccacgttagaggacacatcgccactcacatgcctctcctcccaatttctcacttcgtatctattactgtttagaggttatagaatttatcacaggcaaacctggtgcgttactcaaatgtaatctataacaaattattctgaagcttacctacatctattctaaaaagctagggataatacttttcatgcctgtttgatttgagataaagtttcttttctcctcttctagatcctctttaaaccctcaggctatgcaatatccaatttttttaagatttacatcagtttaaagatatttcataagttatttttcatttcagtctttctttaaatagtttgtttaggtttatagatcccaaatatgaatttagacaatttggtttcattgaagttttttcccaaattattctctcgcacaatagtttataaataaaaaataaatacagaaatatactaaatgatacccttctcagaaatgataaaatagtaacattggaaaaataagttaagaaaatatttataccaattttattttattcataaatacaatgtttccagttagttttgagaagaaggtgacaaacatttggaagaataatacaaaatacaactgggtgactttcctatttgtttcacttttttgttgttgttgttgttgtttatcacgtgccaaaccctgcactaatcttctagccagaatttttgtttatttattcatttacttattgagacagagtctcgctctgtcaccaagctggagcgcagtggcgtgatcgtggctcactgcaacctccacctcccgggttcaagcgattctcttgcctcagcctcccaagtagttgggattacaagcaagtgccaccatgcccagctaagttttgtatttttagtagagacggcgtttcatcatgttggccaggatgatctcgatctcctgaccttgcgatccaccggccttcgcctcccaatagccagaattattataattaaccctcaccataaccttatgtgggtatttcaggtatagaaaggaggaaactggagcccctgtgccttaactcatttaaaaaaaccacacctccttcagggatagctgcagtttgcctcagatttctctcattctctgatgttaatgactataataatttgaccaacaaggctccggtccttaagagcgctagtgctgtgtaaactatcccgggttacacatacctctgaaagaattcttaacccctgactccaaagattagttcaataagttcatgtctccagatctccagggcaaggacgatgggcccagcttgggagaacagtggaagcaacgttgctgaaggtgattcccaggtctccgtttcatttagccctggcagaatcactgcctcatgctcagagagagtatgactgaaaaaaacaaaaccagcaaaccaagaaacccgggagaaacaggggctcctataataatccttccacagagtctctcccttccttgaccaccaccgtggcctcctacagatcactgggaggtgacggactccccaggccgtccccatcgagctgctcttccacagtcctcctcttttcttgtggaacagtcatgttggtcaactgcatttcccacgtccagcgcctgattgacctgtcgggccgtcattccgactgttcattccccggccactctctgctgagcaagtccaccctgactgctcactcctactgctactgccatcctgggcacagattctaaaagcagaagctttgaataaagtgtgtgatcttcttccagggcagttatttctatttatggttgtattcattcattcattcattcattcatcattcagctactatttagtacagaaatacccagctactctgcccgaggacattcactaagtacctaacttggtctacctaaagtgagtgctgtagagaaaatcacaagtagggagactcaaataaatgaactaaaatacgaaggaaaccaggaggcagacagggaaaggcgtgagaggggatcaaaatttcacaaagaccatgcatttctgaagagaggccagaaaaaggttctataatagtatacacaacaattaaatttatgaattatttaaggtgaataacctaaaatgttaataactagatattaaaaaaacaacttatttattaacctgaaaacaatgtaatatatagcaaaaatgtataaaacaatactatttcttgaaagttgttttatatttaaaaggagtcataacctttaaaaagccttcagaattatccagaagaaacaataaccattattgacttccagagatagattagaaaaagagctattataaataaagagattgataattgaattagggatgctatattttgtacttcgtatgcctactatatcatcattcggccaatttaatttgccttgaaaagagttgcatggcttaattgatttttcaaataagttttccactctcaaagttactctgccaaagctttatttaaatctgtacgccactttcaattacagatacagttatgccaacagaataaggcattttattctgcttaattctttccaagatggaaatgaaaaaaatgaacttttaggaattggtaacattttcacttaccatagccgatgggtaatgagatcctccaggtgcagtctaagttgttggggtaagaacctgggaagccggggctcaggatcacaccacccaaggtgctcagcgtccctccacaggttgctgttaagtggacaagatgtcagtcctgcaggtcctcactttctccctggaatctttgctccaacctgcttcactcaactatgctgagaaagagcaagtcttcggagttaattctgcccctaattacagcacacgatacaatgctgtgtgccttagttatttatgagctgtgctctccctcttgacagtgaactgctttagaataaagaccatttttcaagatccatcttctcctctcacactcaaaggctcccagtaaagatgagtccatgtaatgtttgcgtcacagtcaggcatcaaatggacttcagtatattagctgctactcattgagaggtagtattactccctattgattgattgctaactatgtggtacttactgtgcctagataaatacattgcatagattaactcacatagcaaccctgaaaggattaccattcccctcttacacatgaagaaaccaagcctggaagagatgaagaaatttgcctaaagtgacatgcctggtaaacagtacaaccagaaggtcattccagctgcgtctggttccagtacccaagtttcagccaccacacatgactgtcagatagcttttcaatttcggaaggcagctaactgcaaccactttctccccaggaaatcttatgctgtgagagagggtgaaataagttcatgcatcttgccttatcttggcgactcacatgttttgctactgtatctgaggtttgactacaaagagacacaactgattttacaacaaacatgcccagtgatacaagacgaagcatttgaagttccaatctttgatcatttgtagcctattaaaataatttcttatattccaaaattaatgcaaatgatgccacttcttttcaggaagcccaaaggaaatggctttattctaacaatgctctcattatgcaaaatgttttaaacaaaatattttctggaagccctcttttagaggccccctaggacctgtggtgaagcctttttcttttttaatcatcatcaagactgaaacaacttatttgtaatttgagaaatagctaaaacttaagtctagtgaatatggtgattgctcaagccagggcaccatattctggatttcaaacattgtataagttgaaaaatgtgagctacaaacatttaaaagtatatttttgtggtgtgagtcataattctggaaaagtcttggacaccatcaactgtgttgctatttaaagtataacctctcaaggcgacttctttgtggcagagactaggcatttgcaaggccaggctcccatgtgcactttgtccatgcagctgctgaatgtgcggaagacacaccagcaaatctgagtggcatgcctacatacatttagcagtaacaccctttcccttagggctcgtgggacctgcagtgacagtagatgtgtatatccaactgtcagaggtgttaaaccagaacaactccacctggaataggagctggataaaacaaggctgaaacgtactgggctgcattcccagatggtgaaggctttctaagtcacaggatgagagagaaggtcagtacaaaatacaggtcacaaataccttgctgacaaaacaggctgcagtaaagaaaccggctaaacccaccaaagccaagatggccatgagtgtgacctctggttgtcctcactgctacactcccaccagcaccaagacagtttacaaatgccacggcaacgtcaggaacttaccctctatggtctaaaaaggggaggcatgaataacccaccgcttgtttagcatatcatcaagaaacaaccataaaaatgggcaaccagcagccctcggggctgctctgtctatggagtaaccattcttttgttcctttactttcttaataaacttgctttcactttactctacggattcgtcctgaattctttcttgcacaagatccaagaaccctctcctggggtgtggatcacaacccctttcctgtaacacaactacagggaagacacgaatgaaaaaggccgaatcaatgacaaaaaaaggaaaacaacagaaccagtaaatgtggtattactaaaaagttccttttgattttagcatgattttcacacacacatgcagagggaaattataaaatacaaacactcatacatatcttcagctgaggactgaggcagccctgcaggaggggctggcccaggacctcagcgtagacagcatcatcaacacggatgtctgtgtcccacacagaccaactctctgtgtgatgggaaactgatcatgggcctgaccactgggttcatctcctgtcaaacatgcatcaatcacctaattacttgagagcttagttaaaaccacggtaatcctttgtttttgatgttgcttatctagaaaactacaagtcaatagataagcgtaaaaacagagctcccaaaagacgcatatccatcttttcttcctttgtaacttttttttaagacagagtcttgccctgtcacccaggctggactgcagtggtgcaatctcagctcactgcaacctccgcctccctggttcaagtgattctcctgcctcagcctcccgagtagctgggattacaggcgcccacaactgcgactacgcctggctaatttttgtatttttagtagagatggggtttcaccatgttggtcaggctggtctcgaactcctgacctcaggtgatccacctgcctcggcctcccgaagtgaggggattacaggcctgagccactgtgcccagccctttgtgacattttaaggcgactgggcttgccatgtcttagattggttcagtgtccatctctgtgtggtcatcaagttgcagactgacttcctgcctcctgcctgggaagctccctccatgccagaccctttcttataggtaaatagcatatttagagttattggtaaatgtggtttttgtaaagggaaaggagtttatttttataaaatggctagagaccttatattttactggatttatacatcttattttgtgtgaattcttggttttggcgggagaaagaatatacagaatttttactgaaggacacagacacaccatgctgaagagccctgcggtgcagtgagacagggaggtcctgggccacctgctgtgacatgaacttcacccagctgtagagccctagaaaactgcgagaccattctggggcttgttataaatattcaaaacagtcaatactggttaaattctgagaacactgcttgatatattaacctctagagaagtggttttatatacattctcttcattagtacttttatttttcaaaattaggtcatgggatttccaggagctcttaagtaaaatattatctctctatggacttctcctcttacaattccccagtttggagtaatctaaagctaacagctacaaaaaaccttttaatcactagaatctgtctttgagatttatcatgggtcatgtgtgagtttttaaaacaatgaaaaaacttgtataccctgtaaagaattacagaagttgacataacttaaacatgtgctaatatttacgatgttaagtaaaagagaaaagcctattatattttgcaaatataagttaattctttgaataaaacatcccattatgtaatacaaagtgacagcaaaggcatattatttgagtctatgtctgcttagaattgatttcattgtgaagtttaaaaaatttcaattcctgacttttagggaaggctcttcatttaaaaataaataggcagattgatgttctgtatgaatcaaaggcagttttaattgtttcgttttttaaattttttaattttttccttccaaatcaaggctgggattttttttttttttttttttttttttgagacagaatctcgctctgtcacccaggatggagtgcagtggcgcgatcttggctcactgcaagctccgcctcccaggttcacgccattctcctgcctcagcctcccgagtagctgagactacagatggtcgccaccacgcccagctaattttttgtatttttagtagagacgggattttaccgtgttagccaggatggtctcgatctcctgacttcgtgatccactcgcctcagcctcccaaagtgctgggattacaggcgtgagccaccgcgcccggtcaaggctgggattttaaacgtctgtaaaagtagctcaatgtttttagctgacatgttaatctagacatttatttttaccaagacatagcttttaaaaataagatactgtcctctaaggtatatttttcacttgtaagcaactatgatgtagtgaacataacataaacagacgttctctcctggatgagcctatcataaaggctgaagttttttgttttacaggtttcgtgcagttttattttcctctgtacacaatttcacctgcatcccatgcaaggcagttaaattgtgtattactaaaaaccattgaatacctaaatttatttgagatgtggggaaattaggctgtcagaagaatgtgtaacagacagtaattacctcgctttacttgtgggtgcccacaccacactacgccgaaatgaattctaaacagaatgtgaatagctcccaggacaattttaaggctattctgtggcctttaaaatagctaatgttcatccatatagagttgaccactttctcctaaaacaccatttggcagtatggcatgtttgaggctgactgtctggacataaatgggttctgagcacacccccagcaatacttgagtgttcgaagactgtggggaacaataaagacagcaccccagaagtgtgactgttataatgatccaggctctctgatactcattcattccctagccattctttaattgaaattcttgagtgtctaccatgtgctgaagatacagaggtgagtattgcaagtctctgtcaccaaagcctttggggattgtagaagggcaaattaaagagcaatatcattacaactctgcaggaagtaaagtcaggcacatggtggtggtagcccagggtagagatgactcactgcacctgcaggtgggagctcagagagcattgaggaggggacactctctccagtgcaaaattcaagagggtgcctaaaccctccaataaatattttaatgcaatatttggaaaaaataaaaagaaaggcagaaaatctatgatgaacaaaatatgaaaattttaaataaagacaagatcagtactgccgatgtttccttttgcctctttcctgtgataaagttggagtatggctgaatatgggagctgtaggttaggattccatggagacgataatttaggaggggactgtgccatcttaaagatggggcattggagctaagaatcacaggggaggatacgctcaggtggaaggggtgacaggagtgagaagtcacttggatttagggagtgagggagaaatttaaggtaatacccagatttgttgtttagacaaaaaaaaaaaaaaaaaaaaaagcaggatactgctaatagcattcgcagaggaagtagatccaggagaacaacaataggtttggagaagccgatcactttgtgggttgcgggtaaggagtgtcaagtaactgaccatgatcctactgagacagtacctgcaaggttgaatggttgcctgagctacaggtaaaggtttctgagttgggctacaacaaataggtgatgggtgaagctgggggcctgaatgatggggagcaaagggcaccctgacatcaccaacctttgtactgagggacttgtgaccaccaccttcaatgcccctggaatcattaaactcccatcacattacctatgctaacagtttagggagtctcaagccattaaatacagctctggaaagctttttcctaaagaagccggctgattgtgcccccaggagcgcatccacaagatagtcaccaggctgtttccaacatgaaatactccatcactccatcagtaatctgtcattctgaattttcttcctgggaacttgttttttctgaggctaaaggtctatacagaaaactccccagactttcagaccagctgcattccttctttgccacaaattaacaaactggccttctgacacacatgtcgttttggtgcagggccgtgagcgggcagtcttgcctctggtctgtgcgggctgacccagacacactgagaagacggagttgctgcatccagtggggaaggtgcaggttaaacgcatcattctgctctactgcattatgtgctattagtatataacacgtgttttgaaattaagaaatttagaagtgcattctttgaccccaagagtagagcaggcatgttcttcccagtgtgtgcgcagcagcagagttacagaaggtgcatccttaccaatgcacaggggagacggatagttccaacggcgaacggtccctggcatacaggaaatgtgggaacggccctgtttaaaagaaaacaaaagaaaatacatataactaaaaacagagtatttaaggattaaatgtttgagaatatctgcattttttcctttcttgttttaattataaatatttgaaaattcaaaaattgtgaaatctgtttttagtaatgattattagtgagtcacattttgaaccaacatagaaaagtatccattttcaccgtgtttctttctactaaaaacaaaatcttgcaatgtccttttgaccagaccataattcgactcagctcctttcttgatacttaagagtactgaattgggcaaaatatgcattttttttttcattcaccagaatttacagcttttggcctaagaagctgaaaacaattagaaagtactaggtggtgattaaaaggccaaaatgtcagcaatacaaagtctgcttatggagaggtagcttcggtggttgtctgtgcttccgcgtcacatgactaccagggttcagcaaagcactgggtcgtttctttatcacagaacggagacttcacattcattttctcactagacatcctcacacatcacaacaacctgcctgcaatgaaattaaccctcatcactcagggtctctttaccctgtaaatacatgaattttccactttctactttaaaaaatctgttccagtctttctcaatgaaaaaaaaaacaaacagtagagggttaaattcaaagatgttttgtgctaacatctctttctcagtaaaagagaggtgatccatgagacctctgtgtgcggcctatttttatatttttcctgatcgtgactcggtggccttatcagccaggtttgcttatctcataaatttccatttgccacccacaattggcatagaggcaattgaaaaacaatatctaatgtatgttaaataattccagccacactgggaacgcatcaaacaagcgtttgcactaatgcagttatcaatggcaaaccgattccctaagctctcaaacatttcatactcaatccacctgccacaaaactaactttctcatacctcttgatatttttaaaagtagttacagtaaagaagaccatatttaattttaaagaagatactccaggtaattttgtgctgccggcattgacactctctgtatccccattcttcgacgcattaaattatccttacaaatttccttctgaaatagggaaaaacatagagttcaaaagtctcaaaaaattttcatcagagactaccaataaaatggtcatttattaccaatctaggtaatattctgctattgattttgttataaacgtttccgatgagcgattctagctacaagttttctaataaatcaaaacaagataggaccctgtgcatttatttactagtttttacaccaatgggaattttcttttttatgtttaaaaagaccattaaaacaagttgagagaagatggaagtcatacatcattccaatattcaggatttactttcagcgtgtgatgtcatggcagcccctgaatcacactaggcatatgtatttatagacactcacgtgtgaactatgcaaggaacaatgcttttcatgactaatatgtaattgatgcatctgttgttccaaatatattaaagtgttagtaaaattgtcagttgttagcaattcaaaaaaaatccagaatccttttttgctcatgtgaatgacaaacagcagcttgcaaactcaaagcttggcattgtttgtaacgaagaaaagaaacacagcttagtttgcatttgaaaaacagagctaataaacggtctgctgggactgtgcagaagtgcatccacaggcctgtgtccctaagcagcatattcaataatccattataagaaatttctttggtaaagaattatttctattttcttctctgagagctgtcataatatcatttataaaagaacggcaacagaatctgcaaagtctcaccatcaggtagaaagaagaggaacatcgatgagcaagagcaaatattacagtttgggaatttgagggagaatggaggaaacatgatatttacctgatttcaggcaattataaagcaagccccgaaaaaggcacaaaaacagcatgtcagtacagattgaggtgtccctctaaatgagatccttgagatatgaaagacaattcttttctttttttctttttttaagatagggtcttgctctgtcacctaggctggagtgcagtggtgcaatctcggctcactgcaacctccgcctcctgtttcaagcgatccacccacctcagcctcccaggtaactgggactaaaggaatgcgccgccatgcccagctcatttttgtattttttgtagagatggtgtctcactgtgttgcccaggctggtctcaaactcctcgattcaagcaatcctctgactttggaatcccaaagtgctgggattacaggtgtgagccactgcaaccggcctaggataattctttctgacatatcaggtggatcaggaacgttgtgtcctaaagattcagcctgaatagcttgagtgtgtttggttacaaacttactgaggtatcccaactttcaggagtccttactcaccagtttccactacagagactctcgctctgcctccaatctttttgcagagttacaattattgtggtacccaccaagatggtgttataatgtaagtggtaggtttgttcttacgaaggtggctttatacattgatactggtttctaataacagctacaatagttttcctatactaaagtgtgccagttatttcacagatattttctctaagctgaaagcatacatcacatggtacccatgtcccacggttgatcaggagaagtgagattttgtatataaagcacttggtaatgcacccctttagcattcagcgtttgccagcccctgttcttgctcttaacttgattcactgctacacaatatttaccccaatgtacatgcagaaactgaattccacacagtgctgttatttcacggctgtagtgttgcaactctgcatataagaacatagctaaacaattttcctttaaaacctatcagtgtcagtgtcattataaacatacagctaaaatattctattacctgaattaactgaagagctggaatgtcaatcgacctatatatttctcctgactttagaatatacatgttttgattatcaatttttattgctggcagagagaattatataataattatgctaagtgatagacactattctgagagtaggcttactcatggttaaactagaaaatattaataataaataataagagaaaaatgactactcttgccatacattagattataaatcattcatcaaaacttttatataaaaaactcttggctggacacagtagctcacacctgtaatcccagcactttgggaggccaaggcaggtggatcacctgaggtcaggagttcgagaccagcttggccaacatggtgaaaccccatctctactaaaaatacaaaaagtagccgggtgtggtggcaggtgcctgtaataccagctacttgggaggctgaggcaggagaattgtttgaatctgggaggcggagcttgcagtgagccaagatcaagatcatgccgctgcactccagcctgggtgacagagcgagactccctctcagaaaaaaaaaaaaaaaaaaaaaccctctttatatagaagatagtaaaagttcattgaaaaacttctacttaatagtttttaaaacttacttaaatgttttattttggtgccttatctacctagcccaaagagggcattaatgatgacttatactgaatgatgagaacagtttgcagggtagcaggtgcacatacagaagcagattcaattactggctgccaggagaggactttcaaagagacagtgttgatattttgcccctagaatgctctgtgcatagttattgggaacgcatatattttgaaataaaacaattgtgaaaaatacaatgcttagctttgaaagagtacattatcacttaaaagctgtttccaaatggtgacgaagatgaccaacatgcatgatttaatatgaatagtatgattcacaaactgagtgaggaaaacatgggtacaaagtgagggctttggctttaagagagctgcacaaagatgaccatgtgtatgttattcctgagcactgagaagaaggatacctgcagggtgtacccgggctcgcactggaaggagagcacgtcgttcaccatgtaccgatctccgattttgatgctgttgctggggagggctggttcttggcatgcagcaagacctacagctagaaatgcaaagacaaatgctagaaattatatgatgtaaacaatattcttatcatttgaataaccaaagtttatttctattgctctccttctgtagaaatgaacaaagacttcaactctttctcttgttattctaccaagaagactttgagtacctttaaatcagagctatgagttaattgttaaaaattaaattatcttattttcattacacaatgaatcaaggctttgatttcaataacaaaatttgttacttccacattgagtatagaagatcccaacttcaatatatacatattgtaaaaagtctcttcaaaaattgtgtttttatgatatgtaaaactccaggatattgccctcttacttttgtttttcaagcatacttagcagtctttatataaaaaaattatgtgtgaatcttggaattctgttcttctacaaaaaaaaaaaagagaaaaaatattttacattcaatctctctctctctttctcttaaagacaacaaaaaaggatctcatgaacagtctgttcttcattaaacagaaacaatatttacagaacctaaagctgtaatcctgcactttcctagatgaattgcattcagttaagacactcacagatttttttaaaggcatcatataatactggaactcagcctaaggtatcagataaacgaattctaaaacactgaaacctctctgtataaatccttatcataagaataaacaagatatgcagctaccatattttgtagaatcaaaaattgattttggtttatcaaaaggtacaaactttccattatgagatgagcaagttctgaggatctaaagtgtacagcattggatgttgatggatatattaatttcatttaattaaaaaatgcatttgaaatggtgctaagggcttgttgaatacaaataatttattccattattctaacatgtcatgaagaaatagtggagaaaggcttctcttggtaggccagcttcacattctttatggggccttggattcgcactttagttcttgtacttcacaacaacaggagagaacttatcagattacttaattgactgggactctcagaaaggaagctggggtggaggaggtgagtaggactttagttaatcagaaggaaaaaaaaaaaaacagcaggagaacaggtccactcaggggcagtcccatgctagtggtccccaggcacagagaggacgcagctgcctgcactgcccatgggccggtccccacgcggggctctgccctgaagccagtcagctttccctgcttcatctgcttcatgcctgctccacgtctcaccagacttcactttccgaaaaagaaaaaaaaaaaaaagcacaagtgcaaagataaaatgattaagaacttcaaaaccagcggccaccaagcacgagacccagtgtgactcacgcagtgcccactcaggaagcagctgtgggtcgaagctacagagtcagcagcaaggtcaagggaaaccctgggtcatccctgcatggctgtcactgtgccagacgcattatactaactccagtccccaccagaccctcatagccaggctccttgtgtctgatattaaacaaaaggcaaagtgaagtcagcctggctgcagagttgcacaggtcggtgtgtccatgtatatgagcctgatctctcatgcgtgttgagctaacagtacacttcctccactgcctggatgatggagcctgtaagagatgtgttcaccagtgccgaccccagatctgctgagtcggaggcaacaccatcccaaatccttcaccagcttgccgagtgtttccccaaatctgagagggcgaaatggagagagagaagtgtcttcatcttacagtaccgtgattgttcatttgagaatcccatgctacggaatccaggtcagaatggaaagcagtggtacataaactagttgagtaatgtcaggccacagaacccattgattctgtatagaatgagtaggtaggaggagtgccacgaactttttctaagttgaaatagatttttccttaaatggctgcatttttagaagtatgaagtaccataagcattaagcagcaatatactttattcctaccacagattttcaagccattggggctttacatagaagataaaactgctaaatatgaaaaaatatatacaatcacttaggcctttaacttcttttactaatgtaagtctaaaatcttttgttttaactttagaacatagattactacatttaaatcccatcttttctttcctaccacatattagcaaggtcatctaccatacatctctgagttttttatttccccctgaaaaaaatgtatacttaaaatactaggtaaattttaactacagtcgggaatactaaaaatctactttagggtgatactaagtcatcgtcattctgagatacttcaaggacacaccaggtgacacagaacgaagaatatcgattacaaaaacaggttccaaatatcaagacaaaatattttgaaatgaaaagtgaaacattacaattcatattaaaggccagttactaaacttgcatgttttacccataagatatgatgtgtttttattatatattgatttatatgcagttattacatattgatttattgtcattttctcctttcttgaattctattcaattgatcctctggggaaaaaaaaattgcatttatatctggcctttaaggaattataattaatttataattaattataaataaatgaataaaataaaaacacacaaaaataccattttgaccggtgtttaacatggccagactcaggaagcagttctatgcagagcacaatatttgaaatgtaaaaagaaccatcttttcttctcccttcgccagtgtcactacacacccagtatatgttagaagctaagaatgcaaagagattaatacctggtatgtgtaagaatattttttatcaatattatttaaacctgctactatattaaaaggagtgacaaagtgcataagcgattgatatgatcagagcccaagtattttccatactttgcatttctctcataaagatgcactaattcgcttgcaacactaggagtaattcaagtcatcatgagaacagtggtttttaatttttattttttatttatttatttttttatttatttttgagacagagtctcactctgtcgcccaggctggagtgcagtggtgtgatctcagctcacttcaagctccacctcccgggttcatgccattctcctgcctcagcctcctgagtagctgggactacaggtgcccgccaccacgcccggctaatttttttatatttttagaaaagacggggtttcaccatgttagccagggtggtcttgaactcctgacctcgtgatccacctgcctcagcctccccaaagtgctgggagaacggtggttttttgttggtaaaggtgtgtcagatgcaggggcagaagacagctaggcttgacatacaggacagtgatggggatgttaaaatagggcaagagtggagcacaggagaactctgagctttttgggaatgcggtgaaaccttctgagagagaaatcaaccatctacagaatggctccgaaacagaaaagccagaaaggaggtgggggaatgtagacaataacatagaagacaaggcagtgaaccttctgacctttaggggacagaaggtcgtctattgatgaatttttggtacagaaaaaattagactatttatatttattcactgtattagtcaaaatgtgaaacaaatatgatatgataggaagtaggcagggtggtgtttggtaataaatatgaactgtgtagaaggtaagcttgagtctatacatgtatacataattctctttttagacttttaaaaagaatcatgtactttaaaaaaaaagaattttaaaaagaattatgtatgataattcttatcacatcatgtctgttaggctgggcatggtgactcatgcctgtaatccaggcactttgggaggccgaggcaggcagatcacctgaggtcaggtgttcaagaccagcctggccaacatggccctgaaaccccgtctcgaccacaaatgcaaaaagtacccgggcgtggtggtgtgcacctgtagtcccacctactcgggaggctgaggcaggagaatcgcttgaacctgggaagcagaggttgcagtgagccaaggtcacaccactgcactccagcctgggcaacagagcgagactccatctcaaaaaaataaaataaaaaataaaaagagaatgctaatcaacaagtctgcctttcctgaagtgttttagaagaacgatgtttgcattgattgaaagtgatctctcatattgtcaagccaggggtagcagtatcatataaataatgggcaaacctatagaaatagacatttataagtatttatatagacacaaaacataggtatctaggaagacatatacaaataaaaagaattatttattcttaaggcagactaaaaagaactcacaaaacgtaactatgataggaaaattctagattaattttccagaagcagagatatctgggaaaaagtaagctgtcttattgtttaggaaaattttcaagagaaataatttgtacttctttcaaatcacagcatacatatgcttcataccataaatgataatatatcatatggggtgaagcaatgcttctttaaaaggtggttcacagggcggggcacagtggctcacgcctgtcatcccagcactttgggaggccaaggcaggtggatcacaaggtcaagagttccagagcagcctggtcaacatggtgaaaccccgtctctactaagaatacaaaaattagccaggcgtggtggcatgtgcctgtaatcgcaggtacttgggaggctgaggcaggagaagtgcttgaacccaggaggcggaggttgcagtgagccgagatcgcacactgcactccagcctgagtgacagagcaagactccaacttggaaaaagaaaaaaaaaaaaaaaaaaggtggttcacaaactattaggttggctatcacttttaatggcaaaaaccacaattatttttgtgccaacctaatacatgactctgaatgcccaggtgccctgattaaatgtgaagacaacataaaggtaattcttgtgcaatctacacatttaaaaacacttaaacaagaaagaacaaaacgcaggcattgggaaaggaggtgggtcttatgtactgtagtgttttatacaatattatccactgatacattttgtgttcaattccaatgttaaaatttggacatttacaaagatgcttctatgtaaaattgcaattagatgtagaatgtagcaagagaagtttttaaaccccatgaatccagcctatgaaagcaaagaatctaaaacacagccattaagaagatgagtgtcctaatttgaccaaaaacactttaatggcttcacctaccactgatcataaaacgtgagcattaagaatcagaatataacaatcagcctcatcaggtccctggaatttattgtagccatttttctaaatccatcaggcaaaattctgagaatagtttgcttaaatcttccagataaaaatgattttagaacacatgataaacatgcaattttaatcaaatacttaaaacaggacaaatgggacttttgtagatattatgaactgaaatgaccttgggcaattttcctcaactgtgcatgactggcagagtgtaaggttttcaaacatcacaattagaaaaaaaaaaaaaagatatttcaaactagagagctcaaaacaaaaaagttgataagcagagagtgagggaagcagacccatgtgaagagattaatagaggagtagcatgaaacagggtcaagaaatcaaaatacaggcgcatacagacacctgagtattcaacgcccaggtagaccatgaacactatgtggaacgtaagtggttattctctaattttgaaaagacaacaacttgttggctgtagtgtttattgtaattgactacataattattctctggcacacgacacacagatgaaaattcctctttttctagatgcgcacaggtatggcacaccctaacacagaggtgctgctcgttatttttgttaactcttaattcgaaaaatcgcattaaagttgagataatgtgctggaacataggggaagaaagaaatcaagtcacccaaggagacatcatgtgagcctgacaatggaggaagtaaatgtcaaatgccatgattatagacagctataaatgtggacctctgcacccagacttctatgtcacagtgtgtaaggagtcagtaagtcttcatcacacacacacacacacacacaaatatatatatatatggaaaacgccattaataacatagtaccttatgaaaagaaaagaaactgttttatttatcatctgggaaatttagattgtagaggtaaaaagattttgtctcatctgtaaactgttggcaggtttgacacatatcttaaatgctatttctattatttccacttgttacatcctgcagtctcttcaaagcataaaggagtgcatgtctggtgacaagggaagtgacaaaatacctttaggggaagtaaaatgttctctctctctctctctcaggggctcacaaattatattagcattttactggtgcagagaaactctgcagtgatgaactctcatcaagtttatttaatacatggtttccaaaatttctctggtcacaggactattttggtctacgtaccacccaccaacaacctggaccagtatcctcattcatgggcagatggtaagtaatgtattcaaggtcataagccaggaaatgacatagcctctgcattacacatgtgcaggaatcatgcatctcagtgaattacagactccaccccaaacagtacagccctgtttacatcctaggagaaaccagaggagacaagtttcaggactttggatttggcattgattttttgataggagaccacagtcacaggtaacaaaagcaaaaatatacaaatgtgactacatcaaacatgaaaaagaaaacaatggagtgaaaagtctacattctgctgctaagtgaaataagccagtatcaaaaaaaagacaaatattgtatgattccactcatataaactatctctagtagtcgaaatcatagaaaaaaaaaaggaaatgtggttgcctagggctaggagtagcaaacagacagaattagtgtttaatgagtgcagagttttgcaagatgtgaacattgtagagattggctacaaaacaatgtgcatatacttaataccactgaactgtacgcttaacaatagttaacatgatgtcatgttatttatatttttatcacaatagaaaggactgaggagcccgctgagtctagagctagaaatatagcacaagttgaacaaggcacctgtgagatatagcacggtttcttttcaaatagcatgctcagcttcttattctctaattccaagtaccccccactttcttctttctggtgtcactacatgcccagacatgccacagccccagctcacattcctttcctgatgtgagaatgggctggctctctagtcctctgtggatgaccccttcctcctctcccctctctcccatcacacgcccacctcatctaagaaagtttaaatgtttagccaactgagtctaaattgtgcggcctgaccccagccaatggggaaaggacacaagtgcaggagtcgcgttaggcataaaagcttctactctcctttgcggcgctgctgtggcagccagccctgctagaagcacccttctgcgcaaaagtaaatttgctttgctgagaaatcctgtttgagtgctcatttttctttacaactccgagttttatttctttttattgtattttatttttttttgagacggagtctcgctctgtggcccaggctggagtgcagtggtgtgatcttggctcactgcaagctccgcctcccgggttcacaccattctcccgcctcagcctcccgagtagctgggactacaggcgcctaccaccatacctggctaattgttttgtatttttagtagagacggggtttcactgtgttagccaggatggtctcgatctcctgaccttgtcatccgcccgcctcggcctcccaaagtgctgggattacaggcgtgagccaccgtgcccggcccgagctttatttctaacagcacctctaatgtgtgctttaccctcccatagcacagaatatactgcattttaagtcttttgtttacagctctctcattctgtagcatgagctcctaaagattgatcttgaatggccattgtgaatttaatttttaattaatccatggatcatgcacaactgtaggaaatacaaagcagttcataaatatgtgaagatcaaaaattgttcacactttaaaatagtgaactgtgtaagtttgtatttaaaatggactattgaaaacaagatatggtcacagaatctacccctgatttctttaaagcattttcccactgattggacattattacctaataattacatcacatgaaaagaaacgagtcaacacacttgggtgatgaactagttgccacatgatttagaaatgccataataaagcgggcacacaatgttgaaccactgaaggatttttagccggatataattaatgatctgctcaaagtgacattttggaataaatctgagcatggtgttgtgttgaaaaaagtcaaggacagaaagatcacttgaaatttatgattatagttcatgagaatgacaagatttggggaaacagatattttaaaatgagaaataaacaagtgccccaatcagatagtgttaaaaaggcttgaatgccaattatagatcctttataaagtatcgcatgacttcctggtgaactgtgatagaagcactgggaaagaaagcttctacttcatttttacttattcaacaggaagtaaagaatagacaacctggtgacagaaagtggggggactccaagcagcccagcctgatttccacttcaaatactatttccctttttaacactcaaaactttactcaccacccatctcaatcccactgacatgtctaaagtccactcccctgtgtctagagccttgatcaaaagtatgacaggactgaggttttcataaatgatgagttggtggttggctaagtcacagagccactagtcattacttattccatgtctagactctttattccctagttacttaccatgaaacatttgcaagacctactgtagaacagagaattctttcaagttttaacatccaagacataaatttggtagaaaaacatcatgaattctaaagtgagtaagaatatcctgaaaccaaaggaattatttaaaaaaatagaataatcataattttcaagtgagcacaacttgtcaatgagacaatatacttctatatctagctctctattgaaatacatgctttgtagtatcatcctttagatttatccattatttgggaatagaggatataagtgtgctcagatagtgccagtttaatacttgttaaatagtttgcatcctgtgtctctatatttgggttcagaaacccactgtgactcaacagttttccctttctgtagcatgcttctgtttccaaaggctagacttacctaaatgatattatatttaatgaaagtaaactcactcaaaaactaaaggatctacaaaatcctgagaattcccttatgcagtaaatcgagctccttgcctgtctcagaaccatgtaaaatcaatgacttccaattattcttagaataaatcctgggctacaacgtactgcgcactgtggctcttgccccctttttcaaccttctttccttttcttctttgtcttccttttctgactgctcacagcccttccttgttctacatttttgtttgttttgtttcacaaatgtgctgggttcttttccacctggggtctctgtattgatattttgctttggctacagcgtttttttcctaagtgtttttatggctgactaatgctcattttttttctagggatacttttaatctgaggcattgctgtcatctgcatctcagaaccccgccaatttgcttcaaggtgcttatcataacctataaccagatttaggtgttttctttctaattgtgcccccacctcaagaatttaaatttgaaattagcagagaccacattgatcttgttgtctggttgtgactctacttacagagtcaagagggcagggcgagacatgtgagtggagtgtgtataattggtggtgcacgtagggaacctacaggacacttaaggggggcagagaaggggaatggagaaagaatcaccctcaggggaggtgggaggaaggcccacatgcactctgtgaaggtcattcctaaagaaaaacaaaccaaacatcgtctcccatgaggcacaagggcagttgaacccaatggcaattgtcagtttccattgaaaccctttcccacatgggcaacattctaaaacaacagtggagtgagaagcggcaatatttatctcatgattgatgattttctgaagcaataagcaggaggtcagcttggaagtacgtgacgttactgataggacctaccactgaaataactgaggtaatcctaagtggctgtcccaagaagtgattgtaggataagtccacccctacccctgccttgtcaaatacattagaacttgaaactccaaagacttgtggaggacaacttgatttcaatcactttatttaggaaggaagtcaactgaagcaccatgtgattacgtaatttatttggcacctgtcccttacactgagtaattgttaaaacgccaaaatatcaccagtaggagtaaaattttaatctgttattagttttttgtgttacactcaacacacaaataaatattgaatgcctaaagtaatattgtagaagtgacttcacattcccagacgaggctctggaattctctgtgatgtaagacagaagccagaatttacattgttttagatatttccatggtccttggtgcacttagaacagtagggatgagagagacatgaataatctttgattgatattaatgaaagcaattttaataggacgcaggaatgcattgtttgtggccaaactgtgaagttgaaggtgggtcttaggaaaattttttgaaatgaatatgtggaaaaagatcttatggagtaattaatgtagaaataaatgcagtaagtgtcttaacatgaggcaatgaagattagttattacactattggatgaatgctggtttatatggtccttcctctgttggaggtagtaagctctcgtctcagtgcacagaatgaaatctctgtaaacacactcgctatattggagttctgctttctctatttatcatgtttcctgtgatgttactcatgttcaccaaaattccaattaagaactctcctcagtagtgttaatgtaatattaaagtgccattaaagcatgtattaataatttgaatgtgcttataaggattattgtaattataggggctaatccaagttatctgtattcaattatggcaacgtcctgccaaaaatgttgagtatgtttcatttcaaaggacataaggcattttccagaattttaatcctcatttagatacttccttctaagtacctgttttgagatgaggaaatgaaatggagctcatacatcagtgaaaacaagaattaaggaagtattttaatggcacattcataagaaacgtgacttcacagtaatattctattgaccagtgtaatcatcagcacagcgaactgcagaaattaattcagttagttatattatgttcccaaaattatatcagaaattgagacagagtccaggcacagtggctcaagcctgtaatcccagcactttgggaggctgaggtgcaaagatggcttaagctcaggagttggagactagcctgggcaacatggtgaaagcctgtatctattaagaatacaaaaaattagctgggtgtggtggcatttgccttcagtcccagctactccaaaggctgaggtgggaggattgcttgaacccaagaggttgagactgaagtgagctgagatcatgccactgcactccagcctgggccagagtgagattctgtctcaaaaaacaaacaataaacaaactataaaaattgagacataaagatcacttctatattttctagaaaaatttttaaaagactatattctcacaaaccttttagaatatagaactaagagcttatctctcttaattactgttttcttttcaaaaagataattacgtaagtaaataccatttccttttatgattttattgtcagaacatttaaagctaaatgtaaagcctaataatagctatcttaaaaatctaggtggctgatatatttatagctttctctttggttgggctgcctttaaaattttttccattaaatttttttttattgtacacactttttttatgttgcatcaaacacttaaagagaaggcagtttatcactttaaaaaatctagatattcttattttttacatgtttgactatgtattttttgagtgagatcttatttgttcatgacatattttttcactatatagctaactaccaattatataaatacatgcaagaatgacttaatcaggtataagttttgaactcagtgcctttaaaatagtagtactatatcacaaaattatctacatatgttaataattgcaaaatataaaagtgtgaatcaaatcaggtaaaacagtaaaatatttatgtttagtttataacgataaaatcatttgactaaagaaaagtaatactttgaacattcaactatactaaaaatgtagaaacaatgtctccattttactcccacctggtaaagaaatagcgtcaattcaaataatgaaagagttgttatatttgttttcttccaattacctcttttttcctcataaccacaaatcactgattcaacctcctacgttattcagaatatattgtaaatgtgatactgcaatttttctatcaggattttctacttccacttccttctttcctttctttcatccctcccttccctccctcccttccttctttccttccttcttttcccttccttcctgcctgcctgcctgcctgcctgccttttttccttccttccttccttccttcttccctccctccctctctccctccctgccttccttccttccttcctttttgtcctccctccctccctcccttcctgaggttgcctttgccatgggtttcatgtttgaggccccgttccctctgcataggcttctgtatctacgagcagagcttcagacgtgggaacatggcttccacactggaccatgtctactgctgggctactatgtaagaaagagtaacttaaatttgctttgcagaatatattagtattatatcttatggattctaaatatattttgttaacttcactgggtttcctagtagtgaatgtgaattaggagaaaaagtaaccttttaagaaaggcagtgaaataaaaaccttacatagaattactttggagctattttgactcagtggcatacattaacactaaagaagctaggataactgcaacagtcttttgcttgagttcaaacataccaattaggtttaggatattaattttggatagatgtcattagatgaggtattgaatgtttcactgtcttgttagaagtaagctaaattagaaataacttggaaagacagaaatacgtataagctgaatcgtaataatagtcaaatttagtgaagaaggcctgaaagtgaaaaatatgattattaaacaagtattattatatattaaaatcaaaatactttctattgtaagccatctctaaatggaaagcaattcttaattagagggaaccattctgctaataattaatctttaatgagaatatacattaaatttaattctgtaatttatctgtgaacatctctgaatgttttcacagttatgatgaaatccatcactatattaaagttatgtgggggacagatagatagatctcattaaaaagtgtgcattcaaaaaaaacttctccacagttaacctaaaaaatattttagtattggtataactatctttgaactagggcaattttcaaacccctaagacccttaaaatctctagagtaattttaaaacctactagagaaattttcagatccttacattgtaaaaccccgtgaactagaacaatgcaaaaatcccatccacttgggatgtagagatctgcaaaaaagaacatccctcccactttaacaacgtaaaaatactgaagtataaaatgatagcttttcttgaacccatcagggagctgcgtggcaggtaccctggtgacctcatttccttttctttctttctttttctttttctttctttttttttttcttgagacagggtcttgctctgtctcccaggctaaagtgcagtggtgcaatcatggctgtctgtagcctcggcctcctgggctcaacggatcatcccacctcagcctcctgtgtaggtgggactacaggtgaggccaccatgcctggctaatttttgcagtttttatagagatgaggttttgccatgttgcccaggctggtcttgagcttctgggctcaagcgatccactcaccacagcctcccaaagtgcttggattataagcatgagcaaccatgcccagcttggtgacctcatttctaaaggacaaactcccccagaagagacgagagccgcatgctacgtgtgaagcaaaacaatggggaaaggcgaccagaaaagaatcatcagcttaataaacaccaactgtcgcaagtggagcctgggcctcgtgtgactctggatgcagacgcatggggagtgtgcccttccacccacaggcctctatcagggggctataagaaagcctaggggcacagctggaggccagaaagagctctcccagcccccagtgcagaggctctgtgacgagaagggcgtgaaacaccatgcatgtccctgaagctttgctcttaggaaacacaaatcttaaaccactgcaggggtgcagcaaaacctgtcatttcaggatctcatattatacataaagtgacataagattatttgaaggtaagctctgctctataaaaggtgtgtttcaatctctaggagaccattacaatattaaaaattcttccctaataagcccatagtagggataactggggcaatagaaatacttaattacaccaaaatctgtcagagaatgtgggaagaaataataaaaaaacagatggggtaaatagaaacactccagtctcggggcccgtgtgttcaatcttgttgttcctcccaccagcttccaccagatcaatactgagttcaataacagtcactgccaccttgttggccagcagtaagatccatcctgtacaccttgaggtcaggctttgtaatttccaggataaatcaatattatcaccgttcacacagttgcactctaagatatctggatatgtattttgtcttggtttcattggttttctttagaaaagaacgcagaacaagagtgacacttgtgttaattctcacatgtccagttaagttaaataacgtgaacgaagactaaatggctatagaatatattaataattcaaagatgctaatctttttgagcttttacttggattctgtaagattacaaagaatctaggtcatatacattaaaccagaggattctgtaagatccctgagactgtagatcatatacattaaaccagactttcttggaactgcttttgctaccattactattttacagcccatctttcaaatataagtgtttggtttttgtttgagaaatttccaccagtgtccatttggatgtactatggttaagggggccttgttttcatttctatatgagaaaagaactcctgagatagaagtagatgtagataagccttaatggcccaggttttagaaccaggcatacttgatcctcagtatggactcacaagctccttgattctccagacatttttcagagagcactgacctttggtgtcattgtttgtaaaacagccatctatacgtcaccttcctggtagggtagtctggatacctcgcaaggtgctcagtaaatggtattcgtaataaaatgcacttttcatgcctgcctctgcatgccatctgttattaacagtgtggctaggacccaggaaggctaaaaatgctctatgctctgtttcttcagttggaagaaatgagcagacttcaaaaatatagggctgttttaaggacaaataagtaacaagcggtaacaagtttagagcaagacctggcatagagtaagcgtctactttttttttccatttttatttcatggacataaaataaaaatctgaatttagagatttgtagattggcagtccatatcttaaaataaatgcaaaaatatgtcaacaaatttaagatatcagaaaatcttttggcgatttacatcaacagtcctgataccatttgacgctaattgtagtaaggttaattctacaaatactttctataatctatatttctttttttttttttttttgagacggagtctcactctgtcacccaggctggagtgcagtggcgcgatcttggctcactgcaagctctgcctcccgggttcacgccattctcctgcctcagcctcctgagcagctgggactacaggcccgccaccacgcctggctaattctttgtatttttagtagatacggggtttcaacgtgttagccaggactgtctcgatctcctgacctcgtgatctgcccgccttggcctcccaaagtgctgggattacaggcgtgagccaccgcgcccagcctataatctatatttcaaattctggcatgaagaataggaacagagaaatgagttcctcttaataactgaatggcataaactatcagaatggtgttagtataaaaaacaaccacttaaaaaagaaaataacaaacaaaaatgtggcattatgtttagcccaattaaaaaatacattaaataattaaacaaaagcttggattctcaaagttcatctgaatgagaaatatgttagtctctcttttttaatgaatgatattgtctaggaataaagagaaatgtagataattatattgatggggctgaagcccaggtaagtgcatatctcactgtatataataataagcatagatgaattatttcactagcccctctttccaagacaaaggaataaaaacccagatgctacaggataactttgagaatgataagagcattcatcaatactaactcccccaaaactattagtgaatttttaaatactatcataaacaaggcttatgtttttctatctacagagagtcacaaagtatatcaaagtagcagattttccagacacatcctacataagtaacatccacagtatcattttatactgtcactgaagtagtcctcttcatataaattgaaataaacttgcagacaaatgcccataataagcaggaaaatttaaccagaatgtgaaacagccctgtggtttgtgcctggcttagaatatttatcatcagctggcaatctggcctttcaaaaatatgcatgcatttacatcgtagcaaactgtttatctcaattcaaaagatcacttattaaagcttatccatgtatttgcttatttgcaactgcttattaaaggagatgaatatcaacgttaaacatttttagtgcttgaaaacaggtcctaaaataaaccttactctcattggaaattcttatttcgcttttacaaggtttacctgcataatcaaacgccaaaaaagatctgtgaatctgacctttgtcattccatttatcagactattaactctgtctcacatccatctttaaaaggttagagtcgactgtgcgatgccttcctccaattaaaatgaataacacacaaatgcaggctccggagcaacagctctctactcgttcttattttaactgcctttgagactagaaacagaaaaggcttatgaccataatctaggcagaagtcaggattgtccaccttctggggaatgctaatatgagtattttttaattactcataaaaaactagtaatattacaagtggttcatttttgtgctttttaatacaaacaacctgaaattatagcagttatatctaattacttgagatttgaacttatacatttacccattaatttgtctctcataatgtatatttcttttgtttgtttgtttgtttttgaaacggcatctcgctctgtcacccgggctggtgtgcagtggtgcaatcttggctcatggcaacctctgcctcccaggtgattctcctgcctcagcctcttaggtagctgagattacaggcgcccgtcaccatgcccagctaatttttttttgtattattattattttttagtagagacggggtttctccgtgttggacagcctggtcttgaacacctgatgtctggtgatccgcccacctcttcctcccaacgtgctgggattataggcatgagtcaccgcaactggcttatgtatttcgtagagccagatttcataacactaaatttcatgcaagtctttcacagttttagaaaaataatatttcactgtttaataagagcatgatttattttttctttaaaaaaatgactcagtataacagtggaagctgtatacagaaagagttgaccttacttttgtattccaggtggaaaccagcagctgccacactaatgtcagactggaaatgcaggtagagttggttggaagtactgttcagcagtgccggtactgtggtgcctgtaagaaacaatgcagatagaattgtaacactacaaatacattcacttttctaaatataaaacatatgagaatacttattaggcttacaaatccctacagtttgtctgattaccagatatttaatctgagtgttggttttattatgtattcagccattctatttttctaggtacaataaaaagttacccattgtctgctctgacctgctcaagtcgatgtgacacctttctcttgtacaaaaactcctattgtagcatgaggtttttttgcattgttttatccatgtaatcttctgcttcttaaatttatttttttacttgacatgaacagagaggaaagaaaagttcaacagccaagagtaatgagggttgagggagcagtcggaccctgtggatagtgatctgacatatccttcagaagacgttgcttttgaccctgtatatatgctcttcctgatccctatgtgactcatgcttagtaatgttccccctggatctgttgatgatttcaactaaagatgcatgaaaaggaatatatagggctattttgacatagtgatttctttacttaaaatgttctagcctacatcacagtaactaaccgattggaaagggcaatacagataccgaggaccagggtaagaaagaagtaatgatgctggcaggtgctgaggaaaagaaaatcgttcatcactcagaagtttgagacattttggtggaatgaatcataatatggaaaaataatagacaagtttaagtcacttttttcctgatgtatgttcaatactctagtaaaaacattctctaaattggaagtgtagacatactcgatgtcaaagaactatccattgtgtaaaaataaccacagtgtagataaattattcaagtactgctgtataaagggagaaatgataatttaaataacaaagcaaagaaataagttgataattattccaaacagatgaacattattgaaaagataagattgtctatcatccttagctcaccacttaaactatccaatatcccccaacagattttatttttttagatggagtctcgctctgtcacccaggctggagtgcagtggcacaatcttgggattctcctgcctcagcttcccaagtagctgagattacaggcatgctccaccatgtcctgctaagttttgtatttttagtagagacgggatttcaccatgttggccaggctggtctcgaactcctgacctcaagtgatctgcttgcctcggcctcccaaagtcctgggattacaggtgtgagccactgcacccggcccccaagagatttgatcagaccaataaccccaggcaaggactctggctgtctttttataagaagctgtgtgtgtgtgtgtgtgtgtgtgtgtgtgtgtgtgtgtgtgtgtgtgtgtgtgtattgttagtagagaagggggactctggctgtctataagaagctgtgtgtgtgtgtgtgtgtatgtgtgtgtattgttagtagagaaggactctggctgtctctttataagaagctctgtgtgtgtgtgtgtgtgtattgttagagaagtggtttcaccgtgttagccaggatggtctcgggggactctggctgtctctttataagaaggtgtgtgtgtgtgtgtgtgtgtgtgtgtgtgtgtgtgtgtgtgtgtgtgtgtgtgtattgttagtagagaaggggttgttagtagagaaggggttgttagtagagaaggggtttcaccgtgttagttaggatggtctcgatcaactgacctcgtgatccgcccgcctcagcctcccaaagtgctggctttacaggcatgagccaccgcacccggcctagaagaggctttttaaacatgaagtgtgtcgaactaaacgcctaatctatctatccctgaaacatcgagtaggtctctaacgcctaatctatctatccctgaaacatcgagtaggtctctaacgcctaatctatctatccctgaaatatcgagtaggtctctaacgtttcttaacgataccatcggcatccatccacgtcacaaactgaacgcctaatctatctatccctgaaacatcgagtaggtctctaacgcctaatctatctatccctgaaatatcgagtaggtctctaatgtttcttaacgataccatcggcacccaccgacgtcacgaactgaacgcctaatctatctatccctgaaacatcgagtaggtctctaacgcctaatctatctatccctgaaatatcgagtaggtctctaacgtttcttaaagataccatcggcatccatccacgtcacaaactgaacgcctaatctatctatccctgaaacatcgagtaggtctctaacgcctaatctatctatccctgaaatatcgagtaggtctctaatgtttcttaacgataccatcggcatccaccgacgtcacgaactgaacgcctaatctatccatccctgaaacatcgagtaggtctctactgtttcttaataccattggcatccatccacatcatcacattcaaagcttcctctttctccatgaccccagactgccctccaatcagtcatcacgccttaactggcgtgcattctaaatattttcccaaattatttcacttaattcatattattttcacaacaatcaccccagtgcaggcagccttatgttaaccagaattagtgcaataatcttccaacttgtttttttgagcctgatcttttcctaattcaatgcattctccattcagcagtcagaaaacactttacaaatgtatatatgatgagacatgttaaaattctcatagattcctgatcatcttaggaccaaatttcacactccttgatttggcccaaagaccctgcatgatctgactgctgcttgcttttctagcttcttatcattacttgtttttcagaatcattttttcttgcttcaagaggctctgtatcataggcctgggatgttcgttccttctcctttgattcactttgactttcctatttctattcattcaaatataaccacttatttcccaaactaagccactcactcaattcaataaacatgagtttatcagccagataaactactaactcattttccaaacatactagttattctctgacttcgtgcaaagcagaaccttccctgattaggacacagcctcaaaaacttgaacctcatcaaatccttaaaggcaatgagcagaccaacggtgccatgcaaaatatgactgtgacagctttaatctgtcttcagttctgctcttatcacattcatctcctgcctgggctaatgaaatagccatcaactgagcttcagaatggatatttgccttcttcttacgcatttgttctgcacacaaaataacctgcttacaattaaataatgcttgcacattttatttctatacatgggcatacgacgtgtcttttaataaaattttaggtcaacttcctgatctatactgtgctttcaggactcatcctatggagatggggaaatttaatctttaccatggctgggaattcctttcctgcctcaggatagccaatagtctcagacttttgagtccttgactccttacttcacataagctcattctccaaccttatccggacccttaaattttagcagtttcatgtttttgtgcacacctttgatagaatgctctttgacaagtccctgctccaaaatctagcctaagtgcatcaggctaccactttgttttcaaggtcctgtcacatccctgttttgtcctggtttgtctcctttataatatagtcttaatcatatgtataagtccattgctttctcaagttccgtgaggtactctagggaactatcaagaactgaagggaccatggaccccctaaatttatagccagttggtcagagtgcaggtggcctgggaggccccgagggcttgcagctgacgtcagaggggagtcctgtggagaagcatgaagtgcacgaactccgtgctaactccaggaaattagcgtcagaattgcattgcagtggtatttatgtcaaacatattttttcaaattttctcctggctaactccaaaaactgaaattaataaaaaggagattgttgttatttttcatgcatacagaggcaatgtggtcacttctttttttcactattattagtaaggcatttccctgctaactttggctaatccatcatgcagctgtcttaattttgccgtctcctgctttctgctggtaatgcctgcatttgtgtgtaaaatgtgttctgtcacagatttatgactgagaacattaggttaaaaacaattcaatatttaatactctcttttgaaaaattaacctatttctaatattaggatatatgaaattattacacatctgaagctaagttcacttgtgatagttactcgagggaaggcttaatatgaggttgctgtacagcagttgataaatccaaatatatgtgaatgataagatttgatcctcagacaaaacgtggcaagacacatactttctaagcaggttttaccaactgaattcataaactgtgaggtaggtgctaggaattgtgcatgacactcagagattaatatagattctgaagaaacttaaatctctacaaactaaaagaacactttacttaaaaatgagcaacacaattcaatatctgagtgtagagaaacagacacagactgcatggctcccgtgacttgaaggatttcctgtctctctctgatttgtctagctatattttactaatctgttaagatattttaatttatttttcccaggtagcttttttttctcttacatcttaaaaaaaaaaaaagtgtgacttttttccctcctgtaacacccatcacctacctgtaatgctgtctatttaccaaatattatttatataattacattaagtgttggcatctgtgtagattttaacttgtgttgttgttgttgatgatgtttttaatgagagaggccttatcttgtattcctaacaacaaacacagtgtctgatatctagcaggtactttaagaaatcacatgctaaactaaactattggaagagctatgtggtcaggggaagaaagagggatttcctggtggagatgggccttgagttctagcttttaaggacagtaatgggctatttgaaataaaagttcctaaaagtataaatagtacacaggcagacaaacatggattgtgaatgacagataacaataagatgatagattggcactttattcccaacaccttaaatggccatgcccaaataaaaatatggttttatttgctgagaaccagagataagatctttgaaccatttgaagtgataaaatggaagttgtatcagacactgtgaatggcctgtgcgctatctattttctttatgttttttaacctattgagtaaaagtagaacggaaatatttagggaaaaaatatccacagttaagaaaaaatatatattccagcctccctttgcagtagagataaacaactgacagaattcagacaaatgggatagaaggagtcagctactgcaagcaagaagggactcatggaaaacagtactttttctgtcatcttggacaattctctagtagctaatctttgttcttcattggtaaaacagagatagcaataatcccttagaacttagttggtgctgtcatattggctacttttggtaattttagtagagacagggtttcgccatgttggccaggctggtctcgaactactgacctcaggtgatccgcccacctcagcctcccaatgtaatgccgggcttacaggcatgagccactgcacctggccatactcaagataaaattaagcattcatgttaacagaagttcataactggcaaagtaaaggctcaggaaatgtgggcaactgtgaggacagtgatgaccagggagataatcgcaatactgatcatcatcactgctcatgaagtttgagtcctaatgctattacagtgtaatgctattacaaagcaaagtgaaagaaagcggtgtcatgcatctggaggcaggatatcctgttaaacaaaagcaaaattgagattgaatgacgctcgagggcaatgggaagggaagacttgcagggcatttggagagcagactcgtcaaggcgggtgcattcgtgagagtcggaggtgcaaggaagactaagagagggtggacttgcagtggactacaatttcgtgcctggctacatatgagtagggtagaatctcaggactagctgagcccacatgctcagtgtaattttcccagattgcttaatgtcaggctgtgcattttaagagttgagaaccgtttcctaacctctgcctctttgctacctcacattactattcctggcttctgctgccagcctgagacctgccgcatgtcaaagctctgctatctgacacttttagattggtctcctcctcgtggagaacacagctttgtttttactcacctgtttcttgatggtcttactctaagactttcagcactagagcaaccattatggagatagaagaattgtgtaggaaaatttctatgtggagtgtttgctgttatttatgttgttttcttggtgtttgcagattttgagtcacacaggtgaggaaattgactccatcttacctgagaagcttcccagtctgggtgcggtcacatccccaccatcgtggatctcaagggagtcccagttctgctccgtggcaaaactgatcacttggatctaccaaaccatgacattaagttaatatttatttttggcttaacacaattagtctaattagatggggttttggggtttttcatgattaaggtgtatatgtatatatatatacatatgtatatgtatatatatatacatatacaccttaataatgcctccaatgccatatatatatacatatacaccttaataatgcctccaatgccataatattatatatatataccttaatcatgaaaatcatctacatgtctatctatctatatatacatggcaaaatttaaaaaaaacaaaacaaaccatgaaagaacaatttatttttctttttcttttcctttcttttttttttttttttttttgagatggagtcttcctctgtcacccaggcttgagtgcaatggtgcaatcttggctcactgcaacctccgcctcccaggttcaagcaattcccctgcctcagcctccctagcagctaggattacaggcgtatactaccatgcctggctagtttttatatttttagtagagacagggtttcaccatgttggccaggctagtcttgaactcctgacatcaagtgatcttcctgtcttggcttcccaaagtgctgggactacatgcatgagccaatgcacacggctgaaagaacaatttctacaaatggtacttttgatagtttttattttaaaaaattgattatatttattcaaaatatagaaaaatggttagaaatattttgttgaaatactaagaaaagggaaacagagtatagtctatgtatttaaaataaccagtataaaaggaaaaaagagagagggagagagagagagatggaaagaaacatagaacaaaagaatgaaagaaagaagcccatggaccccagctgagccctgttgtagactgtggacttcaaggactcacctgaattcccgagccctccgtaactatgatcttccatatacagttcaagttgtttccgtatggctcagggtagccgggggacaggattgtacctcttcgttgagtgaaattgccactgcagggtactaaaagacacaaccatatgtcatgaaataaagtgctgtgggacagtgttgatttggcatgcagttttctttcactgtgtgaccacacagtaagagaaaatgtacatgaacaatgatacgttaaacggcacttttagccaaggtaaaattcagtgtattctcttttaaattagcaaaataattattacctattatgctactcagttatagatcttgagtctataaataaatctatccaagttctctaagaagggatgatgtccaatgatggcatctccaaagtgaattctgtttagaataatttacctactataatttaaggaccttggcagagttttctcttctccatgcagacatgcatctccaaatgatattaatgggatttatgagcaaattcaagagaagaggcgcttaaaatgtacaaatgattcaagtgctaatcatgattgcgctggagctttccacacaaaatgaagcaggtaaactataactaacaaggtcactgttattcagcctgcatttacctattaattttcaaagattcatcagcaccaatttattaaaaggacgttacacaagtaatatagcaaatcaacatgataatggttttttcccaaaatgagattatgttccacacccataactttagagttgatggcctacttcataaatatggagaagggaaacatgctttatccttgttaagatgatgagttgttttatgaaacacaataatttttagggtttggctactaactcaattacttcccatgaaacaaactgccctttaaatgggtcatgagccagatggatttacgtagcctggatagaaacatgagaagtaactctttggcaccaccacagagttctggcgggcagccgcttagggacactgctcacccacacagctggggatcgtgtcgttccactgtgccaaggcgttgggcacggactggcagtggagcgccgtggaaccctgaagcaggtatcccgggttgcactcgaatcggacgatggagccggcagaaaactcagaaccaattctccttccgtatctgggctcggggacagagctgcattgggtgtcactggtacgaggaacagctagaagcaaagtacagaacacagccgtctgtatctccatcagcaagccaggacgttgcgtggaacgtgggtttaagatgggaccaaggagagctgatgcagacagagaatttaataacgactccaacaatcgctatagagaatgatttgaggcgctgggaccacgcagagctggtgcagatagagaagttaataaagcctccaacaatcgctatagagaatgatttgaggagcacgttcccaactgtacttcgccctcaggaccatctcagtgtcctcacttcagatgaggaaaacggcataaaaagactcagtgccttatgaggacggattgatattcaggcgattacatttaatcatcctgctagtgataatgagatgactaaccatgcgtacttgtcctcacaggcctctgagtctaatgagaaaagctaccatatgaaggatttgttataatatggccatcgtgatgtaataaaaatcttaaactaccatcagatccagcaatcccactcgtgtatacttatctaaaggaatttaaattgggatcccagagaaaaatcggtactctcacattcattgtagcattcttcaaaatagtctagatgtgcaaacaacctaaatgtccatcatcagatgaacagataaagaaaacgtggagtagataaaagaagaaattctgctatttgtaataacacggatgaaccttgaggacatcgtgctaagtgaaataagcaaataagcagccacagaagaacgaataccttatgattctacttctatggggagatctaaagtagtggcactcatagaaccagagagatttacaatggtagttactgggggctggggaacaggaaaatgggaagcaactgttgagtggctataaagtttcacttacataaaatgagtatgccctggagacctgctctacagcactgtgtttatagttaagagggtagatttttctaatgagaacacctgctccacgtgccatcatgttgcatttagtcctctctaaagtcacctaggatgagctcaaatcctaacaagccccagccgggtgcagtggcgcaagcctgtaatcccagcactttgggaggcagaggagggtggatcacttgaggtcgagagttcgtttatcagcctggccaacaggtgaaacccccgtctctactaaaaatacaaaaattagccgggcatggtggcacatgtctgtaatcccagctgctcgggagtctgaggcaggataatcgcttcaccctgggaggcataagttgcagtgagccaagatcacaccactgcactccagcctgggtgaaagattgagaaaaaaataaataaagtaaaaaatgaaaaaatagcaagcccctccagttctctcttgatgagactttcctaggttctgtaaaatgggaggccttcattgttgcagcaagcaaaaacccagggatatggaatgacgtgtgtgtatctcatgggctttggatagtgggtactgacaggtaagtatcagtgcaacgtgtgggtgagataactattcaggttgtatggcagaaattaccatctacaggagatattcctgtttatcaaaaggaatgtgggataaagattaaaaaatacttcaattggcaaagaggtccatcacactaggcaaactctgaaaatagttatgccctttgaaatttgcttattttgtttttgtcctctgcagtgaaaaagacagtatttaggtactgtctctgggattctatcctcctcagtccttgtgtttcttcatcctaaatgcacagtcctttagcagaatgttctcgtatatgaattttcccttaaaataacccttctatcttcccacggctttttctgacacactggaatctgttttatttatttattttctgttgaatcagaccaacgacagacattatttgggtaactgctgctggggaagcagttccatgaaaacggaaattggcagattattttgattaaacgatgtttcaatttggtgttgagatattttctatcagaaggcaaaattaataaaagtgtctacctttctaacagcactgatgtggaaaataattaatgatttatcagaatcattcttctccaagctaaaaatgaaatacagaataacgataatattctattataggtcaaggatctcttatctgaaacgtttggtgtttcaggtttggaattcttgtaggtgttggaatatttgcataaacataatgagatatcttagggatgggacccaagtctaaacatgaaattcaatgatgtctaatacatgctttatacacatagtctgatacaccttctacacgtgctttatccttgttaagatgatgacttagtttatgaaacacagtaattgtcatggtttggctactactcaattgtttcccataaaacaagttgccctttaaataggtcacgagccagatggatttatgtagcctggagagaggcacgagaagcagcactttggcacaacggagaagtcctggtgggcagccattttatacaatattttatattttgaaatacaaatacaatattttaaataattttgtgcatgacacaaagtgttgactgcattttctattgtgatttgtccatcacaggaggtcaggtgtgaaatttttcctttgtggagtcatgttggtgctcaaaacaaagcagatttggagcattttgaattttggatattcagattagggatgctcaatccatataacataatatttcttgaaattatttgtgtcatgtttgcatgcttgagtattttattagagttgaataatggcatgaagaaaaaaaaaaagatatcccatagaggcttccacagtcatctcaaggatcttccacaaaatgaagcgctattgccagtttttctacttacactggattgcttacaaaatacctgctatcgtggcaaaggttgcacttatctaagaggcttcaggtattgcatctgtcacttgtatatctgggagctatacaaatatatttgagagctatgcaaacatatttgtacctttgagagatacagggtatcactatctttccaagttcccaaaatgaggagaaatatagcaccaagggtcatttgtacacaagtcactattaactttcttcatgaatttcagagtggtctattttcaaggaaaatgacaataaatgaataacacctgcatctggataacaagacgaaaaatgttttttagaggaagaagtttggaaagtgaggacaccaattgtaaggacttgagacagtaggatagggaggcagggagaagctgtggaattgagacatcacagctccacggaacgtctgggaagcgggtgggtggaaatcagacagtgctgtgtaacttcatcctccccgcccgtcctctgggtctggcccttcacctggacatttcagacggcatccgagagaaaaattctattgtctgtcgtcatcattctctatcctttagtaaatatttcacactgctgtgaagccaaattgaaatcgggccagtggaaaagtgagcaggaatgaggtcagcctggaatagagggtgatcaacaaaatgattgacttctcaggccagacaaccgtgtttcttcagaggcagaacgctctcctctggggctttgaggtgctgaaagtgggaagcagcgcaaatgtgtgctcatctgtcgggaaaagccggaagcatgttgtgacaggttcgatgatcacccttcaacaccacaaatgctctaagctacagatacatgctgctcctttactgcacctctgttacagttgatgtgaaaaccacaacaacaatcataaaataaatctgagtgcatgtaggactcacttgcaatacctaagtgaagcagttttctttttgatgtagtgactgagggacattttctctctcaaaatcattcctctctcatcgttggaaaatcaggttggacaagccattactagtcaatgaattaaaacatacatcactgaattgcaagcaaaattttacatttattcttctttgcaaagaatatgctttttataggctcttgacacaaatgtgagtttttagatgtggaaaaccaactaagccatataattcatgccctctaaaaagaagaagaaaccaagggaaaatcaatcaaaacatgtatttgcctgcccagaaataacctcaagtaaagaaattcttaatgtacatctttcctacccaaactgagaaaaaaatatttctgtgtttttaggtctgtttattttcaggagaccatctgattaactattttattttattttattttattttattttattttattttattttattttatttcatttcatttttgaggtggaaactcattctgtcacccaggctggagtacagtggtgtgatctaggctcactacaatctccacgtcccaggttcaagcaattctcctgcctcagcctctcaagaagctgagactacaggcacatgccaccacacttggctaataattttttttttttttgtacttttagtagagatgggatttcgccatgttagccacgctggtctcaaactcctgagctcagataatctgcctgccttggcctcccaaagtgctaggattataggcatgagccaccatgactggcctaattaactatatttccatgaatgctaaagagactgagtctttccagcagaagaccctggaagaagaagccttgagctcctgagcctgggatgcaggtgctgcttcaggtgaggagcctgggagaggagaacccaggttagagatggtgacccggaaaacatgacttgaaaaagtcctggccaatagacatttacaagctgggcactgcggaaggggttcaatatagaaatatggtttccttttccctttaaaatgtacagtaaatccttgcagtttactcattttggtgtgactgtgtgatctggaaggaactgaaagcagcattgaattctatgttgaaacaaattacagaaataggccttttatgaaaacagccaggcataaatataagacaattgaaaaaagtagcatggatgaggtactctccaacatgaaggtttactgagacacagtcaatcatgcacatcagagggatgcgggagaagacagggcagggtgggcagctgtgaccaccctgtcttaaatccacaggagcctcggagcaggcaggaaagagaaggatgtgggctctgcctctcttggcctctgttttcaggcggattgattctaatgttgaaagacgtgaattacaggccaaagcaaagtctctaaatgcaatgtaattacttaatggcatagaatcaatggcctcttctaatcctggaagaagcagactgtgctggagttactaagaaacagtttgtgtgatgttcggcttttgcattgcgtctaagaatatgttgattttcggtgtaatatattttctgtgaaatgacaaagatccctaaacctgtataaccacggccagtaatgcaggtcctgccagtccctgcttgatggtacaagaccagggaatttagggagaagaggggaagctacaggagtctcctccactgtgaacactcgaggaattcccgggagctaagaaactggtataaaacactttctgcttgatgccaaaaagcaaatgtacaaggctgaacatattcaacatttaaaagcaagaattgtgtatctcccacgtcttcaagaaagcttgctaatgcagggaaaaaatgtagtcatggttcagacttggaatatttaaactgtcagaggtgtttgatccagagtgactccatcttcaataggggctgtataaaatgaggctgagacctactaggctaaattcataggaggtcaggtgttctaagtcacaggatgaggtaggaggtcggcacaaggtatagatcacaaagaccttcctgacaaaaagacgccgtaaagaagccggcccaaatccaccaaaaccaagatggcgactaaagtgacctgtggtcattcccactgctcattatatactaattataatgtattagcatgctaaaagacactcccaccagcacgatgacagtttacaaatgccatggcaatgccaggaagttaccctaaagggtctaaaaaggagagaaatcctagttaaaggaattgtctacccctttcccagaaaactcactaataatccatccctcatttagcatataatcaagaaataatagcaagtagaagcagctgagtggcccatgctgctgctctatggattagccattctttattccttaactttcctaataaacttgtttttactttactctatggactcgccccaaattctttcttgcgcgagatccaagaacctctcttggggtctggatccgcacccctttctggtaacaaaaccattacagatactcttatacttcaggaggggaataattagatttcttttcatgccagcttctcaccatagctttagcttctcaattctatttgattatatcacagctgatgaagtggttgctgattcagaggggggtgaaaggttgggcaggcaggactcatgcctgagccacagctgcaaacagtgctccataatcactgaaacttgttggtaatgcaggtcactcatctcagtctccatactgctccttccatcactggagaccagtgagttgtgagagtttcattcctgggagagtggataatgaccatgcccgttcattcaacggcacgaaactaaagataagagaagctcctggcaagtgctggctcaccatggatacatccatgctgaagggttatccctttctgaagggtcactggccacagccttctctggggcaccccatgatgtcactcacaccttcttctctcatgctttccaaatgtacccttctgctctcaagaagtgtggaaaacacacaaaaacccagcaattgcatagagtaactagaatactgcattaaagagcctctagacttacattgcttcagaagttcagaaagatggtaacatcatcattaattctgtcttcacattactaaccaggatgacatggagggtgggaagcagaaggctagagaccatgatctgtgcatgtctggagtcacacgtttttttgcacactgatgctgttgcaaacatttttcactgtagaccccagcagctctttataacagaactgtgtctgttaacaagggttagctatcctacaaccacggaagacataaagtctgtgtgcaatttgaagctgaatttgtttatgaatgaatgaagctgtaatggtgtatgaaagcactgtttagaatatttttctataatatagctcaaataatttttttttttttttttttttgagacggagtctcgctctgtcacccaggctggagtgcagtggcgcgatctccactcactgcaagctccgcctcccgggttcacgccattctcctgcctcagcctcccgagtagctgggactacaggtgcccgccaccacgcccggctaatttttgtatttttagtagagacggggtttcaccatgttagccaggatggtctcgatctcctgacctcgtgatccgcccgcctcggcctcccaaagtgctgggattacaggcttgagccaccgtgcccggcttcaaatactttttaggcttcaatggaactactgtctttcaagaagcaatgttccatttaacttttcatgtgtatgcaaaacttttaccattgctgttgagtaatttataagttgcatttatgattctagttcttccaaaaaaacttagttttgacaaaaagacatcaattttctgcataaacacactagtaggagcaaagcaagagaaggaggtatattagaaatttataaaatattgaggatgttagagtcgtcatatactcttgaggacaagaaaaataaatttcctctataaatgatgttcttttctttctacttttccgtatctttgacattttgatgaaaacgtattactttaaataagcataatttttaaaatacatgcctaccaaggacaacatttgcatataagacaccaggatatttgcatgcaatatattgtctgatgatgggatagattttataatctttatcaaaaaccaaggaaagccccttataaaggcagacaaggtcagtcactttagtgtttccaggagaaaaaatgttgaggcagcccagtttctttacacatctcacatactttggtctaaacgtgattctgcttttgcaaagtcagatagaatttatttgaaaaaattagaagtagtaagagacgggttgtttcaacaggccactctctaataaagtccatttttaaaaactactgggtaattatttacattttaataaaaggtgtaacttataacaatgtaacaccttttaatgcattagcatctccattcattcaatggctacttacacaggatcagagagatctttgtctcctgattaactgttaagcatcatcctcattctcttcccattactctttaaatgatctaattgctgaaaactgaagggtttttacactgaactgttttgaagtcatgaatttcccaatttgagatgattagaaacgattgatacataatataacactgttatactccacctttttaaaaaatacgtaatagtatcaataatgttttctggaggaatctttattaaaggaaagaaaccattgctaagaaaaaatttttctccagatctgaagaaaatacttaacagtggccattagtatctgtagcctccagcaaaattgagacctagaaaaactaaaatattgctttttatttttgaacacacagtttatctctgaacaagatcatttcttccagatctcaacctttacagtcatgacaagctccacgcaaagacttaatccaagcttctgaaagtgtatgaacagtttatgtggtcattttttcaatgcaaaacaaaagtgaaacaaattaggagaaaattctttactttgcagaatctttgagcaatctcaaatattttttaaaaggtttaaattaaaagataagtataaaggtgtaaaagtacccaaagttaataaaacacaaacaaaataaaataggtatttagttaggataagagatgcatgcgtgatattttgttttttgttttgttttgttaaatttccatttaagcttagtttttataataaaatgtgaaattgtataatgcattttaaacatatttcctatattgttactaagatctcaactatttcaaaatacgtaattagataaaatactgtatttgaagtcatcttacgagatgtgaagagctacagaaaggtaatatgatcaatatttattcccttctagtgcctgataaattagatattattgtgtttttgtagtagaaatatgagtttcaactgtcaaaaaattgtaatatttttattaaataattttattataaacatatgaacaccttcagctccttaaatattacaaaaatgcagctgagatgttttgagtgctttgtctgagactagccgtgggtgcagcatcaggaaagaccacagtgacatgtggagacatgtggagtgacgcttaccttgatacacgaagtggaagccgcgggcagaggcaccgctctttgcactgaatcggagcagaatttgatttgacgtagccaagggcaatgtttcccctagaaacgaaaacagagacagattcagaaaacacacagcaccgtgggggacggtagtattttggaaaatggtgataaagttgaaatttcacatttattttttgaacttttaaaacattttcactttatggtttaaaactcaaatatgttgtttttataaagattaaaaactctgtcctaggcaagaataggcagtgcatttgattaaaatatactgtaatcattatttcgcttatgatttcttttgaagaaagcaccaatggtaggcctatataatagagtagacagaagtaaagggtgaatcatttgctcagaatcaccttactctgattttagttaaaattaaaataattttacttaaaaaatttttaaaagtaactgaatccaaagatgattttttttaaattaaaagattcagaaaaggccttctgaagtatatttttaacctttaaaagcacatataggccaggtgaggtggctcacacctgtaatcccagcattttgggaggctgaagctggtggatcacttgaggccaggagtttgagaccagcctggccaacatggggaaaccacgtctctactaaaaatacaaaaattagccaggcgtggtggtgcatgcctgtaatcccagccactcaggaggctgaggcaggagaatcgcttgaacctgggagatggaggttgcagtgagccgagatggtgccactgcactctagcctgggcaagagagtgagtgagactttgtctcaaaaaaaaataataataataataataaaataaaaataaaaaatatataaaagtgcatataaaatgtggaagagtctgtgtcaagcagtggtgggaggtgtgtgaattggcataaggttttcagaggacaatgtgttactaataatcaacatatttaatgtgtatcctctgatgcattcttagatacatcattgaaccttggtagaaaataacaaaacataggtcttaagacttttagttaataataaaatagagaaaacctggaaatataatcaaatctgaacattaattggtcaaagcttgtgacgcatatcgtttactaggcaaattagtaaatgtacccagtaccaaactgatttagtaaatgatgaaaatgtatcagtacaaataaggggtaggtcatcaattaaaagtggggttaaattgtgctatattaaaccgactgaataccattcagaactcagagtaagggcattgggtgcataccgtgtttgttagagacagacttctgtatgtgattttaagggtaagaatgggataaaaataagttgtgaaataacattccatgttttatgggggctcatgtgtatttgcatgtgtggataaatgtatgcatgtatacatgtgaacacgtgtacatgtgtggctattaatgggtctctctatgtaggacttacaggcttagaatgctttagaccgaaatgttaatcgtttttatctccagaaggaaggttaagacacatgggatacaaaattaaacacagatgatagttgattatcccaccctctttttcggatctttgcaccttttactgagataaatattatattttctgcaatcttagtaagatgataaaagcacgtgattttatgtgtgagataaaaacacttttgagatcttatatctaaaataagatttttctaagcacacacgcaaattcaaaaatgattacatttctcattcatcaaaacaaagcaaaagaaacagacaagttaaaaattaatccccctagctgtctgaactaaattaagggcaaaattctttaagacttacctgagtgagaccccgagagtgagctgagaagtctggcctgtgcatgggttccatcaaataattctgccaaatcattcagggctgtctggaaataggcaaactgtccaaagaccactaaaaaataagaggtgggatgttggcacaagatgctctaagaaaacaaaatggagatttttgatttcactgaatatctattaattgccccaatggatcattatcctaagaatttggtaaaaaaataaatattaacttattttctctgctttctaagttttcagttgacaaaactattttactttgcttcttgacttttggcatttaataaaagaaaaaatactgttttatttccaatttgaacattaaatgaggaatgtttttgttttaataaacacaacattaagaatatatgggctggatgtggtggctcacgcctgtaatcccagtactttgggaggctgaggcaggagaatggcttgaacctggaaggcgaaggttgcaatgagctgagattgtaccactgcactccagcctgggcgacagagtgagactctgtctcaagaaaaaaaagaatatctgtaaagacttccctatattttcaaatatttagcaacactttattcaatgaaaaataagcaaaggatcaaaccccatgatgatttgatgaggaatttaaaattcctcacaaaagattattataatgccaaattcacattaatacgttgccgtattcatacacactgacttatacacgtgattctctggcatataataggaatcccttgctgttttccactctacaatttcatgtatcctacaggttatgaaaggtgtgtgaacacacctcctccaagtgaaacataactacatgctttgtgacttcaaatttaactgatgctgtgtattcagattgacgatacagagggcctttatatttgcaggaaaacctgtgatttggtatatacttacaagcaatgaacaactaattcttttcttatttattgtaagatttgcactacaatcattctaagccattataaacaagaaatggaggtgtgtgcactagttgtgtgtgtcagaattccaacggaaacaattactgttaatatttgttagtatgacggaagtaatctaactgtaacagtgtgtgtgcccatgtgtgtatagacacacatacatatatttatgtaaccaactccatacacacatatctaatataacttgtcttttaagattttataatttcccagagaaaaacacaaagaaggcatgtaggctaggtgaattttcccaatagatgaaatgctctaaaaacttttttcaggaattagagagggagaggacttaataatttctctacagatcttgctcataccatcctcacccacccaccacctccccaagttcattagatttttatcatactggaggcccaaaacttgggtcacaaaagtgaatcatccacagataatttctactctttttcaagaaatatttagctgacatccacctcatactagaaactaagaaaaaaggagggaaggggatagtaacatggtcttaggactatcatgctctaacgtgtttggtaatttccaagacaaacatggattttgagtacaagatgtcaggagccagaatgcccagctcattctggacatggccccaacgtcttccttgaggaacctccttcacctgggttctaacccgtcacacacactgagtcccagtgagcaaactcaattgccaagagagaaaagctgttcactgctatctacgctgctgccggaaatcatgagaatgtgatgagaagaacaaacaaagggttatggggcttcagccgcgggaactgtcaatgcttcatggtgaggggatggcactatcagcaagaaggattagtggaagaatggaatataagaaattatatcagcgaacggaatacaaaaagcaaaatggtggcggggacaaatgcagcaaatagtcaacttcagctaacactccgtggataaaaaacaaacagggggattggaatgcaaaggcctgtggcaaggatctcaaaggccaccctgaaaacaaacactttgctccataaataacaggagtgactaaggatgtttatcacgatactaacatgcttagatttgtgttttagaaagaattcttggctatgcttttggatgagaatagaggaaactgggttatctgaagacctgtcttattaataatatcgcttcgcattttcagcctgtgttgacagacagggagcagcctcttcctacctggtaaggatcacatcaccccgtagtgtctggattgcacatctgcctcacccctcaccataagcctgccagggacatggaccagattcctttcatctttgcatccctgtacttacaaatactgtgagattaattgtttagttaattagtttatttatcaggaaagagtaacgaatgggggaagaaagtaaaagatgagacagaatgcattttcattaaagattcgctgtaactacgttattccacgctgaagctttctgccagataggatgtgatcgtttgtgtgattaaacttttcaaattgggaaattataaacgatatttaggatatgagtatgacttctttagctgaaaatttttaattgtgtaatgatgacaataatattttgtatttaactaaaatcatagaatatggctgctaaattccattgtaataaatatattttgtcatgtttccatgaacagaagacttttttgtgataatcaggggaatactgctgagcatttaggtaaaaaaaaaaaaaattatttcattcaaattcagaattaaggctaaagttaaatgagggactttaaagaatttggtccaacttaaaatttggaatccagaacccattttaagtattactgcccatttatcataacaaagggaacagcaaggtttggggagggtgtgcattacattcgtaagaggcccgggaatcatgacacaatagaagtttacaaaaacactggctcccacacacaagtttcttacacatcaaatatctttcttgtcacatgttaaaaatgctttatctcaaatacgtctaacattagaatttttacctgctttatatgcagagtgagtgctgtctcagacataaataaaaaccttgactatgtagcgttttcaattttcctattggaaagagggacatagtctttaagatgatgacagctactatctggtttactccagaaaagaatctgatccaagataaattgtcctggtcaagagtgagagtgagcattgcataaatgaagtgcagagcgaccagggaaggcccttctggaaatgaagtcattttggaaaattagctggaattggaagcaatgtttaggagggaaacaggaagtcagggttcagcaggtgaaacagtcaagactctgcctgcttctccgtccctcagcacttacaggttgactcaaggatgcagtgatttcgatcatgatctggttactgagttcactgaatgtatgtgccattcatgcacagacatatacacagagttctgacccacccactactttatgagaaatcctccgttgctcataaaaacaaccaactgaaagaactatgtttgggaaacctaagaagaaagccaaattaattctctctgattatttcggatcataaccctagaggggactgtgagcattaatatcacattggtaaaaggactgtaatggacattgtgcaggatatgtttggaaggcctgctacttaaatgcaactcatttgcttttatatgaaatatttcactaagctctagcatacttgtttatcaaatgacagaaaaattaacactgaaaggaaatatgacaatgaattaaaaatacaaggacatccttaccgaattcctttggtaccgtgatggaatagaggcatatttgaccagctgtgtaattatgggggtagtttggtgataaaactaccccttctgatcccgtgtactggcctccacagggagctgaaaataaaatcaaccgagaattagtcgctgtgcaataatagcgcaggtgataggtgagccaaagctgaaacacatcaaacacgtgagcacgtttattgaaaacttgacaaaataagaagttaaaatcttgttttgcattgctatcaaagtcatagaaagacaaagatttaccagggaagaagtaatccaacttaggagaaaaacctaatattattttcaagacatttgtctcagatgtattaaaataataagggaaacatctataataataataaaataggttctataaagacaaatgattaaattattttagaaagtctcgcggagttgtctgttcgaagtcaatcctcatattaacttaagagatacaaagattatttcagttttctatcacttttatattaatatgggaatcaaaggaaaaatgttttgttttttaggggattttctttgttttaacgtttcatcttatagtttcagtaaaagcaacatgcataattactaatgcttttggggtctcttcctatgagttcaatttaaaactaaaagaatccatcattagaaagttagggcttacaaaatatagagaggtgtgtgtgtctgtgtgtgtgtgtatgtgtgtggggggtatgtatgtgtgggggggtatgtctctgtgtgtatgtgtgtgtgtggggtgtgtgtgtatctgtgtgtgtggtatgtgtgtatgtgtgtttggggtgtgtgtgtatgtgtgtattgggggtatgtctgtgtgtgtgtatgtgtgtgtggggggttatgtctgtgtgtgtatgtgtgtgtgtgggtgtatgtgtgtgtgtatgtgtgtgtgggggggttatgtctgtgcgtgtatgtgtgtgtgggtgtatgtgtgtgtggtgtatgtctgcgtgtgtatgtatgtgtgtgtgggaggttatgtctgtgtgtgtatgtgtgtgtgtgtgtatgtgtggggggcgtatgtctgtatgtgtgtgtatgtgtgtgtggggttatgtctgtgtgtgtgtgggtgtatgtgtgtgggggtatgtctgtgtgtgtgtgtatatgtgtgtgtggggggttatgtctgtgtgaatgtgtgggtatgtcttaattttcccccagttatcttatttactttggcttcacttttgctgagaaaatgaaaaacactgtacacagatgttcaatgcactttttaaagcatcatggaagagacctccaattaaatcccagccatttgatatccagtctttagattgccagtactctatttcattatatttctacatgagaaggggccaagtcagctcccctcatctgtttaacatagggcaatgaccagcgtgggagccactcaggacagcctgttgcacccttaccatgctggctgtggcctgactgcacttcctatcttggatataccgccactgatttgaattcagaattagcttcagtatttcagaaagattatatttctacagctcatttcttcttgatatggccattttcttttttttttttcattttctttttttttttttgagatggtgtcttgccctgtcacccaggctggagtacaatggcatgatctcagctcactgcaacctccgccacccgggttcaaacgattctcttgcctcagcctcccgagtagctgcaattactcggcgcccgccaacacacctggctgatttttttttttttcatctttaataaatatgatgttggtcaggctggtctcgaactcctgacctcatgatccgcatggctcagcctcccaaagtgctgggattacaaacgtgagccactgagtccggccacaatggcaattttcaagcctcaaagaataaagaagttagagataacatgtttaattctttgaatgttaattagcattatgttaaatattaattgatggacagaacattttccatgatgaattaagctccttagaatatggtaatgctaaggataaggcaacttgttaatgattagtcaagaaatttcctgaatccctgcattacaatcgcttgaaaaacttaagttgtattctaaaagtcaaaggaaaacagctcagacatctgtcagctttgatctgttcatcaaagctgacagaaatttaagcagagattttacttaaataagctcagccttcatgctagtgtcttaattcaaaatcatgttatcactctaaaacacttctctaaaacacttctatttaggtttttatgattttaaatagaaacattttattttcacttttagatggaggatatttctataagctcaacttcaaaactgaaggtttccaatagaatgctggcatcactcactctaccaacgcagatatatccctcagatatttctctccaccttaaccatgtgaagtcaaccaggttatgtcagacctatctttccttttcctcaaaagcttcaagttcaagtttttaaaaaacttagcacaaataaagattgaaaatatattttatttgcgctcagtcacatacaattcaaacatatcattttgcaaatgatctttttccataaaacaattagttttaaattttagacaagaagtataaataaaaagtggaaacgtcatcactgggccaaaattttgattcccaaattattagcgatggtaaagtaattcttttcaagaacatcttctgatcgctctgtcaccaggctggagtgcagtggtgtgatgtcagctcactgcaacctctgccccccaggttcaagtgattctcctgcctcaacctcccgagcagcagggactacaggtgcacaccaccacacacagctaatttttgtatttttagtagagatgggatttcaccatgttggctaggatggtctggatctgttgacctcgtgatccacctacctcggcctcccaaggtgctgggattacagggctgagccaccacgcccggccatatgttttgtgattgttaatactgaatgtcatcttgattggattgaaggatagaaagtattgatcctgggtatgtctgtgagggtgttgcccaaggagattaatatttgagtcagtgggctggggaaggcagacccacccttaatttgggtgggcaccatctaataaactgcagcatggctagaatataagcaggcagaaaaatgtgaaatgagagactggcctagtctcccagcctacatctttctcctgtgctggatgcttcttgcccctgaacgtcaaactccaagttcttcagttttgggactcggaatggctcttcttgttcctcagcctgcagacagcatattgtgggaatttgtgatcatgtgagttaatgcttaataaactcccctttatatatgtaactattccattagttctgtccctctagagaactctaatacatgtttcaaagtataactacaaagaaacactttgtgcaagcatagaataaaagagcattgccttatgatagtagaggacatttttgaaaagtcaaagatgaaattcaggaaaactgactcagaacttttgtcttttactaccttgataaatagtgcttgtgcctgtccgttcttcctcagatcaaaatgctaagcaccagaactacaatgatacgtttcatacatgaacaacatttgtgttagaaaaatatggatagaatttttatttatttgtttgtttgtttatttatttatttatttatttatttatatttatttatttttgagacagagtcttgctctgtggcccaggctggagtacagtggcgtgatctcggctcactgcaagttccatctcccgggttcatgccattctcctgcctcagcctcccgagtagctgggactacaggcacctgccaccatgcccggctaatttttttgtaattttttagtggaaacggggtttcaccatgttagccaggatgttattgatctcctgaccttgtgatccgcctgcctcggcctcccaaagtgctggaattacaggtgtgagccactgcactcggctatttaattcttaataattgttatgtctgcattactgtgctaatctaagaaacaggcctggtgcttctcaccttagaagttattttattttaatgcaacaacaaaagaaaaataaataaatgtttgttatttggtaattaacatattaaacagattatttcctaaatgaataaagacatacaaaagcattcattgctaatggtaacaagaagcttgcttatccatttggctaattagaatatatacatctcgtacataaaagcaaccacatagaaccaaattgagtaaacaaaactagcaaacagaagtcattgtgacccatgaaaggggctcaactttgcttcaatttcagttacaattctacaaaaaacttcaataagcaaaatttgtaggtaatagacgaataaccaggaaaaacattaccccacgcatctaaaacaaactgccccaaaatgcaccaactgcatcccatgatgcaggaactatcaaaagatttacagtggagcaaaaggccccgaggttaactgttgatctgaataaatcacaggcgctggttcatgcacaaatgtgctgctctccatgagggatccaagatgcactacaggagagaccatctctgctttccagatttataacataaagctttatttgcatgtaaatggaatcctccatttggggaaatcagtgtttcatgcgctgtgctctttgatgactagtaaaataaattgtgcctcactccacagatcttcagacatggaaactgaaacagtctctaattaaaaatttggttttatatatatgacctatatatatataggaatatacatatatatgacctatatatatataggaatatacatatataggaatatgtatatatgtatatatcctatatataggaatatatgtgaatatatatacatatatacgtgtgtatatatgtataattcctatacatatgtgtataaattaatatataggtgtgtgtataaatatatagacaggaatatatatataaagtgtatatacactttatatataattatacatatatatacacacctatatatgtatatacactatatatatataaagtgtatacatatatactttttctttagccacagaaaaggtatttttcctatggctaatactttacccatgctttttctatggctaaagttttatcactccccacaaattcaactgtaattgaatttaatataaattaaatgccttttgtattattagttaacaaaagtacagaattcatgacctttcctcaattttgctacctacttttatctccctcacactagactctatataattgctaaagatatctgaagtgggggaaaaatacaccaggggatgcaaaaatcattttctgggatacaagaaagaaaattagaatttttacccaaaattacatcttttgttttcttgagataaggtattgccctgttgcccaggctggagtgcagtgatccagtcacggctcactgcagcctcaaccttcagagctcaagtgatactcccactacagcctcccgagtagctgggaccccaggtgtgcaccaccccacacagctaattttaattttttttgtagaggtggggtcttgctatgttgtccagactagtcttgaattctggtcctcaagcgatcctcctgccttagtctctcaaagtgctgagattacaggcatgagcagctttgtctggtctaaaattccatctttgtaaatgtctgtgttcatgtagtaattgtgtggtctataacagctgctgagatggtcagtacctgtaatgcgtggcagagatcgaggttgcatgctcaatagttatattgattggatgtcagatcaaaagggtttgaggtcattgccctttgttacatcaaaatggttttggaaaccagttacatacagaattaagatttactagttttggggagccttatgcctgtggaatttatcctcctaacacttgtgacctagagactgtcatcgctctcagccctgcgagtcttgtctggagtgacacagacgggaggaggtgaggcgagatctggtcactctgcagggcgcacctttcagtgctgccgttggctcacaagcccggccctgcccgcactggccatgcctcgtccagaagggaggatcctcaagaccttggacagcagctcacaggcagctcctggccaacctcaagagcacagggcaagcacccagaaccactggcatgcactgcccaggccgctcaggatatgaggggcacccaggctggtggcaagacaagagggggtggaggtgtggcccaccctgggccaggacagggaagggtgggtgctgggcagagacttccagctgcctcgtgcccacctcaccaagtgacacccacttcttcgtttgtctccgtcctgttttgggggctgtgcaggcaccagggagaccttggtcttgacctgtaatgctagatcaaaggctctctttacctcaaagccactctggctcactgcctccctcacccatgagcacgctgagttctatttgaagctcccatatgcttcttattttagtttttaataaacttaaaaaagaaacactctataacttcccattcacaaaagtctcccaaagcaagtaacacaatgactacactatcagaatttttaattaaacatgactagaaaggactgatgcataacctggcctatgatcacgattttaaaacacaaaaaataacgttcttcctctgtcgatctgttgcccaggctatagtgcagtggagcaatctcggctcactgaaaccttcacctaccaggctccagcgatcctcctacctcatcctcccaagcagctgggactacaggcatgagccaccacatccagctaagttttgtattgtgtttttggtagagatggggttttgtcatgttgctcaggctggtctcaaactcctgagctcaagggatccactagccttggcctcccatagtgttgggattacaggtgtgagccactacacctggcctaagttcttactctgtgccagtctctactgctgggtccagacagctacacttctttaacttaaaaggtttcaggatcataagagaatggacttagaaacatagaaatagcagaacacgccagggaagtaggttttgttttattttgttttgcttgtttgattttagtttcttatatactttttttttttttttgagagagagtttcactcttgttgcccaagctggagtgtaatggcacaatctcagcttccacaacctctgcctcccgggttcaagcgattctcctgcctcagcctcccaagtagctgggattacaggtgtgcaccaccacgcccagctaattttttgtatttttagtagaaagggggtttctccatgttagccatggtctcgaactcctgacctcaggtgatccacccacgtcagcctcccaaattgctgggattacaggtgtgagccacgcgcccagtctcttatacagtaatatttaaaatgtttatttggcctgaagctgccagtagcattgttaggctgtcttaagaaaaacacatttgtttcataatttatcaaacgaaactggtctttgagctcatcttaaaataaccctagaaatgaatgtctctgcaacaagccatgaagttctacctcattcttcttcttttttaaatatataccatgaaaatgtaaaaggtacaagtcaagggtccacagcctgaggagtgtttgcctatagagacccccatgaaaccaccacctaggtgaagatatgcaccctggccagcagccaggaagtctaccctcccactcttcccagttcacacccacagggcagctgctgtctgacttcatcactgtaggttagttttgtctgtccttgaaagctgattcaacgattttactaatttcattcctaaggaattacaaactattgctgttttggggggaaatgacatatccatttaaatatatacatattagttttttctctctatatatatacagataaataggtgtaaatatatatgtgtgtgtgtatgtatatatataaaaatatatgtacattaaaatatatatgtatatatgtaaaaatatatgtgtgtgtatgtatatatatgtgtgtgtgtatgtatatatatgtatgagactccatctcatatatatatatgtgtgtctgtgtatgtgtgtgtgtgtatatacatacacatatatatatatatatatgagatggagtcttgctctgtcacccaggctggagtgcagtggcacaatctcagctcactgcccaggttcaagcgattctcctgcctcaccctactgagtagctgggatcacaggcacgcaccaccacacccagttaatttttgtatttttagcggagacagggtttcaccatcttggccaggctggtctcgaactcctaacctcgcgatccactcgcctcagcctcttgaagtgctgggattacaggcatgagctaccacgcccggctagaagtaagtattttatatatggagagagagagagagagaagtaactagagaaggctaattagcacctcttataaagaacagatctagaacacacaaaaacagaagtgaaaaatgtaaaactgtacgagcgaaggaaaaatattgctcctcccagaaacctatgagaatggctaacacactagctgcattaaatgatcaatgaatgactgatattcgttccacactagctctctaagcaatcctcaccaccgatgagaggaatacgtgttgaaatgtgaaaccatttcttcaatgagatgctgcattttaaaggaaagttgtatttctagaaaatacccaagcgtgcactcaccattgcaggagggcagcacttggtcccaggagggtttcccatcagccccaatcacacaggtgatggatgaggggtcaagaatcttatagccagagtcacactggtaggtgatggtggagccaagcttgaagtctgttccaactcttgtcccattcattatatttcctgggtcaaaacaagcttcccgtggtttctctgtggaagaaatgaatgtaaactgcatgagagcagggatcttattcttgtttgtgtttttgtttgttgggttggttctttaattgtgttatttagggcctagaacaatgtcctaaataagtaagaaatgctcaaagaatatttattgattggctattgaccaagtgaaactattaattaaaataagaaaattcctttttaataaaattatatttccattttaaaaaccacattttgctacagaattgatataaaattaccttcatctacataaaaaatacagtactacgtttttatatatttatccatttttggctacagattttaggactgaatcaaagaaaaattgactctggaaaaattgaggttcattttctaacttttgtacatcaaacatattaacataaaatcattccacacctttcagaaaagactggagaatttggcttctcaaaatgaaacagtttaattcctgaaagttaagagcactttcttatacgaataacaacagacagacttagaagatgaagatggatgcttgttctcattcttttactaccgtatttctgttgttagtcttaatagagtaaacgtcaaacttagaagaaaaaaatacattgactgatagatgatggtcaaacattgtgcactggatgtactaacagccaatagttctaccttagttaaaataattgctgaaatttattgagggctcattatgtaccagacatggaactaggtgcatttcttgtttaattctaatctccaggacacctctgccaggaaaggatcataagaatgtaaaactcaaggaaagttaagtcacttccacaaagaccccctgcagagacctgcccacttctggggcccctcaattaggcattcacttttggctgcattaagtatttcttcttcccaagtaaaaatacaaaaccttttttcttcagtcatgttgttctgcagtcaatttcagttatcttctggtagccttaatatttttaattttctgtttcaatagaccatctaaaatatctctaaatgaaaaagtgtataaccctgcagtctaccaccctgctagaaatagataaatataatgggagaggaaaaagcaaaaacaaaaatgctaaactttgggaagctctggaggaagaaaaagagacctgattaactgtatttattcaatattttcaattatatttttaataatccatgtgtaatcatcaaccaaacagagatgtctttggtgatcattgacttaatcatcgtatacattatataaagaatctattataataatgtattatatttaataaactatatttcctatataatttacatactttgattaaatctatattaatatatattatatatataagttttctcatttaagaatttgagattaaatgatacatatatattttatatacatttcttgttttgtgccttcaaaccagtgctctctaattgctttgttgaaaagctgtttggatgtttaaaatggtagctgacatgttgataattctttgtaactgcattaaatcccatatagaatatagaacattattttaagcaaatacagatcaaataagtaaacctgtaagtactatgaaagttgctcagtttttctgatattttatttaatcattcaacacaatgtactgaggatctagtgaatagaagcatggacttgttcacaatattttcccctattgaaaataaaaaatttcccagtacacatctattaatgtatgtctgttgctcttgtgtcctttttgatcatttttttgttataaatctcttttagtctagtttcctgtttgattaaatatcacctacacaactttcttctttatgccactaattttgatttctgatggcaggattttttcccaatggactgcatctaatcttttagttccattactgacttgtcacttcaggatgttccgtgataaatcactggcacattttttgcttacaatttgccaggcttctaactagatgacttcataacagggtgtattttgtgttgtccgtgtccgttccacttatgcatacctttgagctttcctgcatcagaggccaggtggattgcctcagccaggatttgtgaattgttgcacagcacgactgcctggtgttccttctatttcccatcatgcctaagaactggatctgtcacctgctttgctatccacaccagcacttgctctgggctgcatgcaatacaatgacatcactgcaccaggcttagatgcaatcactgccctaggctggatgcaatggcatcactgcttgaggctggatgcaatggcatcatttctccaggctagatgcaatgacatcactgccctaggctgcatgcaatgacatcactgctccaggctggatacaatagcatcactgccctaggctggatgcaatggcatcactgctccaggctggaagaaatggcatcatttttccaggctacatgcaatgacatcactgtcgtgggctgcatgcaatggcatcactgctccaggctgcatgcaatggcatcattcctattctctttcctgtgatttttatttttcacagactccactggagagcttttaaaacctcaggaactacagcctccagttagatggccataccggttacccaaacaaaaattaaggaagttctttcttcatgcaacctgtaaggcccttcatacttcattcattcgttggcccatttattcatgtgccttaggatgccggggagaacaggagttgtcagagtgggcaatgatcagtgtacattctcacaattatatgaggaattgttttgtttacttgcctgcatgattttgttgggggcgtggggggctatcatagaataagtactgtcatggtaaaatgcattttagtgaattcttgttaagaaactaaattatgatgtggcaaaggctcaaaagtactgttttcaactattcctaaacgtgacggatcccatctcaaaggcataggatactctgattgctaaattgtataatttttaaaattgtacattttagtaaatacccctaagtgtgcagattctgatgtttgggagcaaagaaaccaattttctacttaaaactatataaacagttctggtaatgaggtaagagacataaaatatgttctttttaaaaagatttttcacacaaattgaactcaaaagtgtaaataaatataaatattttcattttttaaagaaaaccctcctaactgtgaattgatattttgttaagtcctcttccctaattctttgtaatacaccttgtattttattttgttcacatgagaaataaatttgaaaaaacatatatttattctgatggacccaatagcaaaatgttgagttgaaggtggtttttcaggtcagtctgttttccttggatgttagtggcagggaatggtttatagcaaatcaagggtaaatcactgatctgatgataaaagaaaagagctctgagcagcgtcagaaaccttgctaaaccagccatagctgactgaggcagggaagggtacagatatgttgacatggaaaatgttgagataaaatgaagttattggccgggcgcggtggctcacgcctgtaatcgcagcactttgggaggccgaggtgggaggatcatgaggtcaggagatcgagatcatcctggctaacactgtgaaaccccgtctctactaaaaatacaaaaaatcagccgggcgtggtggcagctgcctgtagtcccagctactcgggaggctgaggaaggagaatcgcttgaaccctggaggcagaggttgcagtgagctgagatcacactgcagcactccagcctgcatgatagagcaagactccatctcaaaaataaaaaaaaaaagaaattatttttggctgggcacggtgactcacgtctataatcacagcactttgggaggccgaggcaggtggatcacctgaggtcaggagatcgagaccagcctgaccaatatgatgaaacccagtctctactaaaaatacaaaaattagccgtgtatggtggcatgctcctgtaattccagctactcggggggctgagacaggagaatcatttgaacccgggaggcggaggttgcagcgagctgacatcgtgccattgccctccagcctgggcaacaagagcaaaactctgtctcaagaaaaaagaaaaaaaaaagttattttcatgtacttacatttaatcatcttgaagaaacaaattataaggtgttaaaacccgtcttaaaataattattaaatgtcatcaaattctttattttacaaaccacaatttatttttatatggccatgaactgggacagtttttttcccctctctttcttcctccagttaaagtagaaatgcacctcaggaatatcttcactggagagggaggagacatgtatcttcccagacagaggagacacatatcagcatttatgtattaaacagacaagcaagatgttacaaagcaatgcctacaataaaaacagtcctgatacaaattaattcccactcaaattcaggcaatcgcaatacctttaaattcaatggcgaaccctgaaaggcccacggaggcatcactccgaaatgccagaaacaggctgtttccgctactctctattctttctggggcctgagagccctggtaactcccaatgagggggctgttggaatcttccccttcatagatgtgtaggaagtcatagctgggctccatgttgaaactaaagaaaagaatagtaattatgtcatacggctaacagatattttatctcccagagtggtaagcctttgagctcagaaagtgattttatttgcttttgtataatgatttttcagttagggcaatcaaaaagttaaatgtagtatgaatcaaaatattaataaaatagcaatagtataaaatacatcaattgtgacaaatactatttgcctaattaccatcatgttcaatacaatattattctgaccacagccaaaaggaaataagtcataatagcagaggtatgctatcctttccgtgtactcattaatttgctaaatgagatgtaatttaaaagaaccaagctcaaaagagacacatttccactgaccttttatctttatctgaatatttttagttttgaaaatactggaattttgaaaatattgcaatttcaaaatattggaatagtcagtagaattactgactattcttacttttatttttacttaaaaaatgcagttctcccagcctaggtaacataatgagatcctgtctgtacaaaaatacaaaagttagtagagtgtggtggtgcacacttgtagtcctagctactcaggaagctaaggctggatgatcacttgaggccaggagtctgaggctgcaatgagctatgaccacaccactgcacccatgcactccaccctgagagacagaacaagaccctgtcaaaaaaaaaaaaagactccacttgcgtggataaatcagcgaatattaatagcccctacaatgcccagagtgtaacctttctcacatcatgtttcaccatcactgaatatcccagttttttttctctgtccctctctttctttctctcactttctccatttttctgtttctctctgctctaatattaacatacagtcagtccccaaagagtgtaacaatttaaattcaaaggtgtcaagggctgggctgtgtttgccattggtgatgtgtaggctgatagagtctctgagctttaaaactacgcacactctaagagaaaggctgagcttggttaagatgtctaagatcttgatatgaccagaataaactgataaagtagaagtattaaaaccatccattgcagcagagcacagtggctctagcctgtaatcccagcactttgggaggctgaggcaggcagatcacgaggtcaggagttcgagaacagcctggccaatatggtgaaaccctctctctactaaaaatacaaaaattagcagagcatggtgtcgtgcacctgtagtcccagctgctcgggaggctgaggcagaagaatcgcttgaacccgggaagcggaggttgcagtgagtcaagatcacgccactgcactccagcctgggtgacagacagagcaaaactcatctcaaaaaccaatcaaccaaccaaccaagcaaccaaccaatccatccattgcagctgccccttccctcttcttctctatagcaggtttttcatatgtgtctttaaaaagcactcaatttacaaagctcctactccctttcctttccaactgcagaaatttgggacaactgagacagagaaggtcagggtttttgcttgttggtttgtttgtttgttttgtaatcactaaaatgttctaggtggctccacttgatctggagattcggatgataaaatagcaacagaagttccctcctggaaaggtccactgcaccatgaaggggaacagagaacgtggtaccgccagcatcggtgcaacgcccagcctgcattatgccaacctgttttgggtcaaggataccctcactccacatcctgaatatacttattaaaggaaatttaggaaggtgtcttagtctgtttatttgacaagttcactgacgtcaggaatgaagaaggaataaaaggttggagttactaggtataggcgctagcaggaatggtgtgggttacgtagaattttattggaataataattgtatttagagtattggcaaggatgttattaaaatctggtcatgtcatatccccaatatttggcttagttaattatcattattggtaatttatgcaatactgcaaatactgccagacacaggaaaacaaacaaacaaacaaacaaacaaacaaacactatatatcccatctgctctcttttttttttgcctgtaccaaaattcatgcgtagaagtctggagtgaaatttataactaattttggctcctttggagaactccttatttctacctctgccagctgcacgtatctctaagctcttacagcatgccaaagcctgactcaaattgaaccaaattcaatttgagccccaatgtgtgagccccacaatccacagggacgtgtaatggaacatcctctctcatccacagccctgaacgagcctgggagcccatatgtccttcaggtcatatgattctttgcctttaccattagtaatgccagactcccaccctcccataaaaaaaacacacctgaatttgccatcatcctgacactgcatcttggccagccctcatcagcgccagcctcctgcttgggaagctggacatcctcatcccctaacaggattctggtctctccctcctcactacttcccaggtagatgtctgcttgagcacatgcaaactccagatcagagaagtcactggttttcactgatttctgaagtttctgagacattgggtcggctaataagtcataatctatgggttgggagaggcttagagattatctgtttcaaacttccagaggggtgtataaaacgcagtgaaaaaacccttgcacaaaactgccttaaatatgcatatcatcaaatgagttgcactttatgggagggaggaaactcctactaacaaggttttgtgttcaatttcatttttttttttaaagccaaggtcttgctctgttgctcagctcagactagacactcatagctcattgcagcctccacctcctgggctccaacagtcctcctgcctcagcctctcgagtagctagaaccagaggaatacacaagcacaccaagccaatttttaaaattttttgtagtgatggagtcttgctgtgttgcccaggctggtttcaaacttctgaactcaagtgctccccatcttggcctcctgaaatgctgggattacagtcatgaaccaccatgcctggcttcaactgttaacccatttataatatcttgaaaccagaggtgcctcctaattttaaggaagacgctactagaatttaacattaacaaaacccacatagatatctaaaaaatatagccagtgagtgttcactggttttctgtaatagctgagtaacatttggtaaatttgtggcagtttagtaaattcaggaaaagatgactatcaaccaacttaagattcagaatcatagaaacgtaaaattctactgactcagatctcatcaggaggagaaagtgagggtatgtaaacacattcaggccttgaatactgacataaagatctgcagaaaaggaaagtcgttccattgacagattaaaaaatgtaatcccagatacttgtccttggatagctgaaaggtcaataggaaagtctacagaatgactcaccttcataaacaacacattcatttagttcaaaagtcaaagtctaaagttagaaaacatctttggattcaataaattgtaattatcatataccatatactaataatataattatttaaagagtttattttcataaaatgactacagtattagaccttccatcgtctagtttagcaagtacaagttagcatatttttaggactgatatgtagtaactcagactttacagcaaccacatttggggaaactttcattttccaggctctattaagtcttaattttataatgatattagcagtgctaccctcaggaacgtcaggatgtgctgtggaaaggaattcactatcaggcatttagagtgataggagacattgatgagaaattacaccaaatgtctccataccatatttttattatttttaacgaacattctgtttaagccttctcatatgggacacattgtgtgcaagacaaacagtatttaaaaataattcaagtgcatcttaagtagaatgccccaaagcaaaatactgtatttccatttatgtcattttgcagcctggtgtagtctccattagacacaaaatctagcacttacctagatataacattagagactatgaggtcataaaagaagtaatttttaggtatggaattaaaaatcctactaaaaagaggtattctgcaagagacggtaccttttgaatatcaaggcgatgacaaagtccgggttcacttttactctccagtcacattccttcccaggaggatacggctgtgggtagttgggtgacaaaataacacctgctgggcccgtcagattccctccacaagcagctgtcacagaacaaaagttacagagaaaaagtaaggacagcgaagaacgcctgccagtcagtgtggaaggagacaccacagaattctttaagaaaaagacatcagcatttttaccagtccaagagattgtgtgttggttatcaattatcctgataaaattgtaagacccaggaactctgtacatttttcatgtaactgttaatgaattttacataatattccaccccattttcaaagagaattttcaaacttctgacacaaaaaatttctttcctataatttaaaattttctcaattaaatgaaagatgacttaatccccatacctgccaacgtgcacacatgtgcacaaacagaaaaacacttgaataaaaaaaatcccatggacatgattttatggccatgttaattattttgctatttctcacagtttataaaatcattgcctatttcttcttgagtgcatgcttcatgtggtacagggatcatctagctcctgttcattgttttatcccaaacgtctaggcggtttctggatctgaacaagtgttcaggaaatggttattgggtacatgaaaacatggcatttcacattctcccagtcccctggtgtatggaaggcttgaattactttccccatatttcaaagtggcaaaacaaaccccaaaagtttaagtgagctctaagtatacatatcagtgaggagctgagctggagcattactctctgaaaatatcatttgatcacaatgcttggtatattattagaaagaaccactttatatgataataacaaatttagtttgtgtttgaagtcatcaattttgaattaaatgtgtttacatttatattagcaaggcagtaattatgtagctcaatgtggttaataggcaagccagtttttgttcttgaattggaaagtatttaggattgttttatttgtgagataaggtttctcctaaacctctcatctcacggaaggtgtgaaaacactgccgaatttataagtatacacattttagatacatacaagactatgctgagtttaaaagttgtttatatcaaatactgtggtttgtcaccaagttgttttaaagcgtgactacaattaaatcatagtattccacttaaattatatgtcttatttcattcccattattggtcacacatgcactaaaaaatatgtagaaaagaaaatgtcttaattgctgatttttcccctatacaaaaagagactttgttttgtaaataagatgaaggaagatgaaggaacatgcttcacaattttcaataaggagtgcctctttaaatacttatttaacatttctgaaaacttagctttttataggaagaaataacaactaactccagtagttcttgttatactctcacagtctaactgaatgcaaactctgaatgctattgtagaaaacatttataataataaattccacagatatacgttcaagagtaatatgatataatttttacagaaaaagattaaaacttgattttccccagtatgactttttttttttttaatgaatttgaattgtgcagaagcaattgtcccaacagctctcacagggcagtgcctcctcagaatcacgccggggctgctgacagcatcgagcagtacaagcgtggaccgatcagggagcgggagctgatgcagagaaagaaggtacctgaaggtctagaagattctactgcacacaggttttgtaagatgaaaaatgacagattcagggcactggctacagggtgctaccagcaggaagagttcagggatatgattcaaatattgatttaaaagaaacaaaggggaaaccctgtcttattcacactgatcccaggaggcactttcaaatgaggtgatttaaaagctgaaaaagtggaattaaggagtgctgcctggccctgtttgttctctcttttggtctggtattcttcaagttagtttgcttaggttttaattagcttgcaaaatattttagataggattagaatagtaaaaaatgcaactcagagatgctagcaaattctccagaaggaatagacaaagagataaaatccacctattcttttcgacccaccaacccttttacaaaacctttatccactatgctcaacagcacacatacatacgtagcagctccttcaccaccagggtttgaagctggtctttaacgagacccatctacgtttctgcattaaaacatttgaatgttcacaccgttgggggcgataaatattttctaaatagacacctttatgtcaggatgctctgttgtccctaaatgaatttctgcaaacctaggatacattttggcttttcagagtgttttgcaatttggacttggggaaaagcaattgcaggctatataagataatgaagactttttagggacactttactcggaataaggaagttgaagccgaacgtggtggctcacgcttgtaatcccagcactttgggaggccaaggtgggcggatcatctgagggcaggagttcgagaccagtctggctaacatagcaaaacctagtctctactaaaaatacaaaaaatagccgggcgtggtggcacgcacctataatcctagctactcaggaggctgaggcaggagaatcgcttgaacctgggagcggaggctgcagtgagctgagatcacaccactgcactccagcttatgtgacagagcaagactctgtctcaaaaaaaaaaaaaaaaaaaagtcgttaatgtcctttggtctacagaattctccttctagactaagtcaaaaagctaaacagaggaggcttcatggtagaagtcatttcggatgtaacaataacaacaacaaaaaagtgaggtatccaagcaacactcaagaaaaagcaacagcaatggcaggtgttgaaaataagtgttgtcacacacaacaggtgagaggttaagagattttataaaagggaaagaaagagagagagccagtaatgagtaaatatactctaataataaaaagtaaaaaagtaaattagctgatcaatcaggaaagaacaaattcaaacagccaataagcatatgaaaaaaaaaagttcgaccttattattaatttaaaatgccaattaaaacaagacatcatcactttgtgccttaaaatctataaagtgtggtgttttctgtgagtcagagaaaacattaataaatatatatggctgatggcaggttaaatcggtgtgactgctctgaaagagattttaaaaatgggctggacacgatggctcacacctgcaatcccagcactttgggagtctgaggcaggcagatcatgaagtcaggaattcgagaccagcctggccaacatagtgaaaacccatctctactaaaaatacaaaaaaattagccgggcttggtggtgggcgcctgtaatcccagctacttgggaggctgaggcaggagaatcactggaacacggaaggaggttgcagtgagtcgaaatcatgcccctgcactccagcctcggcaactgagtgagactctacctcaaaaacaaaacaaaacaaacacgttttaaaagtccgagaaatatgcgagtttgtagaaatatgtcacttattaataatcctgatttattttgcaacatgagtgctcattgaagctatcttcagaatagggaaaaggttaaaacaacttaattatacaataataagggactagaaagatcaatattggtagattcaaacaaatagatactagagagtggcatcagtggtgtagttgtgccttctaaaaagatttagtcactaaaaacgagtagaaaatacatagtaacacaaaatatacacaccatgtactggtaagtaaaaagtgcaatttacgaaacagtcaagcaggatgttgtcattttaaaacttttttcttttttttttttttgagacagagtctcactctgttgcacaggctggagtgcagtggtgcgatcttggctcactgcaacttctagctcctgggttcaagtgattctcgtgcctcagcctcccaagtagctgggatcacaggcatgcaccaccacccctggccaatgtttgtatttttagtagagatagggtttcaccatgttgcccaggctggtctcaaactcctgatgtcaagtgatctgcccgccttggcctcctaaagtgctgggattacaggtgtgagccaccacacccagactaaaacattttaaaatggattacatatacataattatgaaatcatttataaatgtctatattaattgtaattgtctccaggtaaaaagatgacaacttttttctcctctttgatttaattatagtttataaaatgtcttcagtaaaatgtattaccctttaatatgaaaaaaggtaaaaaaattaaaaagtgttttgaatctttgaaacagaatttacatgagtgctaattataattaactcatgccctaatgggcaagcttcttacagaggacataaacctcattcctaaaaaacagaaaattacaaagtaataaaaatataatgttaacttatttccaattatatattttccatttttctgttacataacacctacgcatgtaggcgggtctggttgccaaaataattgattattcatctgcctgcaagtgatttcagcttgtccttgaagctgacattcaaggtagagacaggggtatttatttaccttttggtgcgtattggactacctagtggctggtcaaaataaagtaactaagagatgatctaacagaagatcgatttgtttatagattcattaggagatggccaacttttataattacatgttcaaattaatataaattaataaattacttttaagggattaactcgtagttatattgctttttaatgtattcctccacgagcctaaaaacatgcaaaatggaaggaaaaaaaaaaaccctttcctactgtaaaagtaggccattggtttaaaatgatcgccacattgataggcaatcactccactttaaaaaagaaacacgccgaaatctctgcagtctcccggtgactcagcttgagtaaaacgcgtgactgtgctcacagacgctatgaaaagtaaacgcagcaccagacattaaacacacatacattgctccccgacaaggctgagaaggctgataaggacagctatccaacctcatctgtcttcagacaactgggataagtggtttgtcataagtaggagcgccgtatcacagctccccaagaccactgagaatttcaccaccgctgtgtacacgacaataaaaaccagttcaaaccacaaaccccctcaaggtcatcctatgcaaaatggcctatccatttcatgatcactttctctcttcacacatcaattaaattttacatttttcagacagattataaagaagtactaattaaactgtgacagttacttaaaataataaagttcagtagtttctttttaagacttagatgatatactctaagtacgaattttattagtagaatattttattgaatgaagagacaatctacctgcaattactattttacataaaatatatattagcctacaaacatatttgtgataaattgtctcaggtggctattcaagccaaagtctgcaaaatcatttgttatccttttaataaggtcaaactataaaatgtcaataaatttcagaaacaaacctccttttatcttcattttaacacaaacagtataatttctagttttcagaattctattttaaatgtactaatatcatagggggaaaaacatctaaaaagagaaagtacttttagtgagtaggttttgcttaagggcatgtttctatattaaaaatcagaatagcaatggtaggtttataaattttgaggcaactagaattttaaattacagacatttgattgatccatgtttatgtaacatttgttaagggtaggaaatatacggtaaatgtcaattactgtaccttaaggggatgacttcctttattctacctcataaaataaagtttaaaggtttacaataaaatttcaggagtctcagagagccagagaacatgaaagaaactcttgagaaatatttctgaagaaataatacatttacggagcgcttttaacgacaacatgcatccattcctgaatataaaatttctaagttctgttgtctgatacctatgcatgtaggagggtctggttgccaaaagaaccggttattcagctgcacacaggtgattttggcttgtccttggagctgatagccagggtcacactggaatgtgacggtgtctccagcctctctgctgtctccatagcgggtgccattttggggcatacctggatcgttacaggtggctgcaattgaggctgcaaacaaaagagaaggcaaggtcacaggctggaaaacatggtttccacattcttgtcggtgtggttgttcttgtgggttgaagcactcttcattggcctaataagtcatttgtctacacatgaacatacgaaaatagtttcttttcccaggggtacattcaataacatacatcttcattgtgcttgcattgcataaactctagcaagattctgttgaaaatgcaaccaatgatgaaatatatcaagggtttttttaaaacaaaaattacattatccttagaataaatacatacatacacacagactgattttctcttcagcaatattttaatgaaaccccatactgcaaattacataaactagttaaagtacaccaacctcaaggaaaacaaaataggaagaatttccttaaggtctgtgccttcaaaggtgatccaataacctttgttgagatgccaagggtggaaggtctagaggagatgaccagtgagttatacccaggatcccataggtgacattgccacggcaaaattattaataaccccctttcactcacccaaaaaattccaagttggacaatatattatatggccaccctaatattaacaaaagctctgaaaataatatcctgcctttctgcatatatataaagaatctcaaatctgctgagtagaggccagactctgcaaagccggctggtgcctgtgctttcaggggccactggagccttatcatatcagtttctggtaatcatgtgtaaagtgcattgcaaacggcgagcctaaaatcacctcccatatgcagccatcgactctgcctgcgcctaatcacagaaggctaccgcaagcccagagttttcaccagagtatcccccatcactctaaaatacagcagcctcaagaaatagcagttgttttctccagtttctataactgctgtgtattatgtgtcgcactgaaaattagaaagataggtactcctgaaaaatccaaagcttagattttttctcatttttactttcagttagaataacgagctctttcttccactccactgcataagagatgacaattaaaagctgactttttctctgcaaagtacttcactgttttcaacaccaagttttatgaaagagcaaaaaaaaagagattagtgtattgttctatatacataccatcacactgtccattttaatatttgaagccttaaagtaatgagtaggctttgcgttttgttttgtaaattctgaagcatttgtgtgtgtgcgtgtgtgtgcatatacatatgtctacatatggatagataaatggaataataaaatccatttaaataaaaagttagaagatatataaaaaagaataagacctgctctgtgttattcagacatttttaacctaataggggtggcaatgaacaaataattcaggacaagagaaaatgttaaactgtgcagattaaaagaccaaagctctatccaatagtgtcatatgatacagacatcaaggatcctatagttggtcagacctgcttcaaatcccatcaggacttaattagtacctaattagtacttaatgatcacttaagcacacttatcatcagctaacaaatcagtaaaaattagactaatatctaagtcattaagtctgctatgaagatgaagtgtgaaaatttgctaacttgtctttctccttgctattctctaagctaattgaggcaagaagctgtcttcaccactctctttctctcaaattgattgttattacattgaaatatatacatgtgtgtatctataacacaatgagaacaatgaaatgaacatctgtgctaccaactctaagcaatagagtatttaccaatacatcagtatgatcaatgcgtagaacatacccttccccatatcaccttcttcctccacttcaggggaagtcactttctgaattttatgtttatcattcccttgcttttcttcacagtgactataaatgtatgcattccacttttagccacatatatcagtttcctgaaatcaaatgcttaactggaattatatgttgcaagttctgtgactctctctgtcttaaatgcttaactggaatacatattgcaagttctgtgactctctgtctctctcccccttgcttgtattatgtttttgggagtcatctacatttaggcatgatgctctggtctactcatttttattgctgtatagttttccattgcaggaatgcaccatgatttttccatcctcttcttgatggatctttgggtcatttttctttttacccttatataaaatgctgctgcgaaaactcttgtacatgctgctggtacacatttgctctttcaaatgacatgggctgctatgttttggattttcacttccaaacagcatgcagttagattgtcctttaaattcaatcccagaattgtcttttaattggatagtttagtctccttatgtgccctgaagttcctgctctatttggatttctctcgaccatcttagcttgtgttttctatgtgcacccccatatgctctacctttttgcttgctttcatactaattaattttttctcgtgcttttattttagtagactttctagaaatttcagtatgtatttagttgtaatagtcttaccttcttctttaatatttattattctcttcctaattacatgcattgctaggtatttcagttatttaaaaaaaaaatcttaaattagacattgtcattgtccatttgtttttataaacctcatacattaaatattattgtttgacatagttgactgatgattgtttaaattttcatacatacttatcaatttgtttgcttattatgttttcttttcattttttttttctgagtttttatttggcctaatttttctacttcataaatactatggcttgactatttgtctcctcaaaaacttacgttgaaatgtaatcaatatggtcatattgggaggtgaggcctttaagaggtgattgtattaatcatttgtaaattagtggattaacggatttatgggctatcacaggaggggaattggtgactttataggaagagtgacctgagctggcatgctcagcccctcgccaggcgatgcctgcacacgttaggactccagaatccccaccagcaagagggccagatgtggtccctcgaccttggacttctcagccagcatatttgtgagaagtatatttattttctttataaattacccagtttcagatattctgttataagcagtagaaaacagactaatacactaaaatggtttgttcgttttgttttgtttggttggtttttgcaagttatgtttagtaaggacatgtgatggcttggattagtttcacatttacttggccgttcatatagtatttggtttcctattcatatttttattctcttttttttcatgattacagtctgaatccgataagaattccaatttctcatgtaaactaagttgtttgtaagttttcacatttgtacttctgttctggggaacttgacttatggtaattctttgcattctgctttgaaggtacacccatccagaggagagtcacattagattacaggatctgcctggaacaacagaaaacctccttttttcaaaaataaattaacagcttgaggcattttggatcccagggatggtagaaattcacctacagactagtgtgaatcccgccggcggttgtgagttgcatgcatctatgtctctgtcaacatcgatgtctgtgtattctccccactctgtgagtagaacaccctttggtgttccagctatacatgagggtctcctatgatattttcaacctcagaaagaccttagatttgctttctattccctgagccaagggactctgagagtggaagctccacatcacagaggatcagcagaggcaatcagggcagggctggcttcctagcttcacaatctctctccatttctgcatttcatatcaaccgggattccttattttgttgcaggttcaatgacacaatttgaaaatccaaaaccaattttatccagcacttttactgtattttcagcatataaattttcagagtcctcactgtaatactgcaaacggaagccactcaatcacacttatttcttaaacactggccatgatttctgagacatcattcttctcgtcattatcagtattattatcattactcgtgttttgaacaggggaatctcacttgaaaacagcactctcagtggagatctagaagagagtgcttgggtttcggagtaggtttttcaatggaaagagagcgggaatgacaataggagttaccggaaggccattgctgtactttcccactttcctcccatcagctgcaaagactggaacacagggaaatccaagcatattactccaagagaagcctgggagagcagaggaaggcaggatagatgtgaagatgcaacacttacagttagaaagtcacgaaggtctcacccataagccacacatttttctaacgtagaacactaatcatagaatacaatcaccagaatcacaaggcaattggccatcatcttggtaccaaaggggtacccttcctgaaccagcattttacacaaattcttgaatttactctttgagtgatattcctatagaatctatgatcaactgttgttgagatttctctggttttcagaaaataatcaaaagcaaatcctactgtacatgcacaatcttgttcatctgaatgaacttcccatcttcaaaggaaaattcttcctttcctcaagcaagtggtgacatgtataattaagcactcatttgcaagtgataatttctgtcacagtttatataggttaaaaaattaacaataagtgtataatattaaaataattgtcatacagtgatagtcactgtaaatatcgcaacatttatacaatgaaatgaatgttatataatagtacaagaatttaaaaacaaaagtttaggaggtgagccaaggacatcagggataacagtttcattataatttttaaaaccaagatgttttcatttctcattcccatatttttatttaatgtttatcaaaagaaaagatatataatactcactactaggaaagttttacacaaaggtgcacagattttatacatgaataagaattttaacggatatatcagccttgcaaaaaataagtgctctgttgaacacttttctgggagttaataggatctggtcaaatgagattggcaaatactgcacaccccagtttccccttagacattcccattgcacattaaggattaaaggctcagagctgtaccacagtaaaaaacttctaaaaatcattgtttaatccagcgtatcccacattgtcatcatagagcacagttttcctagaaaatctcttaagatccttccaaatagaagtccacagaatatcagtagaaacagtgccttgcactagtggttacatgtcctttcatggtataatattctattcatttttgaaagtaccttttgtagttctcaacccaatttttatttggaatacgtataacaataataatgcagcatgcaattaaaagttttaaacttgtgaagttcatgttgtctaataaacagaaatactgcatctacataattagctcgagtttatgccagttatatgaagatgtaagtttttttttttttttttttgagacagagtcttgatctgtcgcccaggctggagtgcagtggcacaatctcggctcactgcaagctccgccttccgggttcacgccattctccttcctcagtctccggagtagctgggactacaggcgcctaccaccacaccaggctaatttttttgtatttttagtagagacagggtttcaccatgttagccaggagagtctcgatctcttaaccttgtgatctgcctgcctcggactccgaaagtgctgggaatacaggtgtgagccaccgcgcctcgccgaaaatgtgagtttcaataaaataattatatatacatttagagctaatgtatatatctgcttgtatattttcaaaggttatttaaaattgccataaactactaaggcttacttaagtttaaacaaacccccaaacactttgtatttagaattatgaaataaagatgaaaagttcctagagttagccagattggactaaaaaaccaataagaaggcttgaggaaggagaaagagaacaattttaaacaatgtagtgcagaatacatcggttgggtctttgaaacaaatttcattttattttcctctagttatgaatgatgcaaagatgttttctgttaaaggcaagaaagcttattctagactaatacaaacccccacccaggggcactccattaggggcagaaactgcttttccacttcaggctcttcacaaagtgattggcagagcacgctgtcattcctcttccagggctgtattcttttatgtgccacatcatacacttcactcatttttctcttaaatatgttttctgcaaattggattttttgctgactctgaaggtttctagtttcttgccataaaaaagaaaacattttcagttgcatccatcttatccctcaacgaccctagaaaaaggcagcgctgttcctgagattatgagtgccctgttttccagtttcccacaggcgttccctggaaaatctcaagtcacagaggcactttccacaggcccattggcctctgaggggacatctctgccacctgtcaggctgcatccagagccatgccagtcagcttgagcaacaaagaacctgcgctgcccttcacaaaacagcagtgggtctgactgtttccaacagcaggattgacaacgtgcggctactgcactgcagaactggacgctgcaataacgccaatctttttgcaactagataagagagatatatatatagtctcacaactttgcaggccgggtgcggtagctcacacctgcaatcctagcactttgggaggccgaggcgagtggatcaaaaggtcagcagttcgagaccagtctgaccaacatggtgaaaccctgtctgtactaaagatacaaaatattagctggtcatggtggtgtgtgtctgtaatctcagctactcgggaggctgaggcaggagactcaggaggtggaggttacagtgagctgagatggcaccattgtactccagcatgggcaacagggcgagactccatctcaaaacaaaaaaccaaaaaaccacaactttgcatataaataaaagtatataatatttttatattaaatattatatatttatatattatataaataacacaactttgcatataaatataatttttatacttatactataaatataattttatacttatactataaatatattttttatacttatactataattttttaaattatactataaatataatttttataattatacttatactacaaatataatttttataattatacttatactacaaatataatttttataattatacttatactacaaatataatttttataattatacttatactacaagtataatttttataattatacttatactacaagtataatttttataattatacttatactataaatataatttttataattatactataaatataatttttataattatacttatatatttttgtatatttattttatgatatgctatatattatatatttattttataatatataatacagatttaaataataaatttcactcgcgtccgtgtgaagagaccaccaaacaggctttgtgtgagcaataaagctgtttatttcacctgggtgcagacgggctgagtccgaaaagagagtcaccgaagggagatacgggtggggccgttttataagatttgggtacgtaaaggaaaattacagtcaaaggggggttgttctctggtgggcaggtgtgggggtgtcacaaggtgctcagcaggggagcttttgagccaggatgagccaggagaaggaatttcacaagataatgtcatcagttaaggcaggaacaggccattttcacttcttttgtggtggaatgtcatcagttaaggcaggaactggccatctggatgtgtacatgcaggtcacaggggatatgatggcttagtttgggttcagaggcctgaaagtcctgttttcttatattaataagaaaaataaaatgaaatagttgtaaagtgctgggacggcaaaaatttttgggggtggtatggagacataatgggcgatgtttctcagggctgcttggagcgagactacgggcagcatgggaacttagagtgggagagatgaagctgaaggaagattttgtggtaaggggtgatattgtggggttgttagaagaaacatttgtcatttagaattattgatgatggcctggatacagttttgtatgaattgaaaaactaaacggaataagaggagaaaaacaggtattaagggactaagaattgggaccacccaggacatctaattagagagtgcctgacgaggttcagcatagccttgccagcaaagattatttatttactttaagtgttaagagtggcaggttggggatggcaccaagagatatcagctgtaatggcttggagaaatagtgtaaaccagcagtgtaatcaagagcagggcatgtataagtagttgagaatggtgaataggagtatgactagacagaagatagtagggatgacaagttttttggggcacagtcaaagttggtgtggtgtctggaatgagactggggcctaagaaaaaggaacatctatacaggagtttaaatgggctataccctgtagcattctgaggacagacctgaattctgagaagggaaagtggtaaaagcactttctattcctttttaagtggtggctgagcttggtaaggttttaaaagaccattagtccgttttacctttcctaaatactgaggagcgtaagggatataaaggtttcactgaataccaagagcctgaaaaaatgcttggctgatttgactaataaaggccggtctgctattggactgtatagaggtgggaaggccaaaccgagaaattatgtctgacagaaggaaagaaatgacaaggctaaactgaagaattatgtctgacagaagggaagaaatgactatggtggccttcttagaccctgtgggaaaggcctctacttatccagtgaaagtgtctacctagaccaagaggtattttagtttgctgactcggggcatgttgagtaaagctaatttgccagtcttgggcaggggcaaatcctggagcttgatgtgtagggaagggtgggggcctgaataatctctgagaagtagtagaatagcagatggaatactgagaagttatttccttgaggatagatttctatgatggaaaggaaatgagaggttctaagaggcgggctagtggctagtactatagcatagcctgcctttgctggcgtggggcgattaggcctggtggaactgccctcaataaaccaagcgtgatgagggcgaggaacaggaaagaaggaaacatggggaaatggggtgaatgtcagatggatcagagagttatagtcataggggtcaggtgtggtatccagaataatgtgggaggctggattgaagtccgggccaggaacaatggtaattgtgggagactcaacaaagagtgaatacagctgaaggagccggggagcagaaagtatatgtgtcaagtgtgaggaagaaaatagattttggaagttatgagaactgtagagagtgagttgagcatagtttgtgattttaagggcctctaaaaggattagggtggtggcggctgccacaagaagacttgagggctaggcaaaacagtaaggtcaagtaatttgggtaaaaaggctactcggtgcggtcccggttcttgtgtaagaattctgactgcgcagcccacacttcagctgtgggtaatgaaaaaggttgggatgagacagggagagctaggatgggggcagtctctaaagctgtcttcaaggaacggaaagaggagtggggaaaggacttaggatctatggggtcagcaaggtttccttttgtgagtttatataatggttttgttaggatggcaaaaccaggtatctaaagtcgaaagtatccaaccatgcctaggaaggaaaggagttgttgttttataggtgttggggtttgagagatcagctgaacacgattggcagggagagcacgtgtgtttttatgagaattacgccgagataggtaacagatgaggaagaaatttgggcttgactgaaataatgggggctgtctgtgaagctttgcggcagtacagcccgggtaatctgctgagcctgatgggtgtcagggtcagtccaagagaaagtgaagagaggctggaatgaaaggcgcaaaggaatagtaaagaaagcaggtttgagatctagaacagaataatgggttgtggagggaggtatcgaggttaggagagtatatgggtttggcaccactgggtggataggcaaaacaatctggttgataaggcgcagatcctgaactaacctgtaaggcttgtctggttctagaacaggtaaaacgggggaattgtaaggagagtttataggctttaagaggtcatgctgtagcaggcaagtgataacaggctttaatccttttaaagcatgctgtgggatgggatattggcattgagcagggtaagggtgattagtttttaatgagatgataaggggtgcatgatcggtcaccaaggagggagtagaggtatctcatacttgtgggttaaggtgaggggatacaagaggaggacgcaacggaggctttggattgggaagaagggcggcaatgagatgtagctgtagtccaggaatagttagggaagcagataatttagttaaagtgtctcggcctaataagggaactgggcaggtggggataactaaaaaggagtgcttaaaagagtattgtctaagctggcaccagagttggggagttttaagaggtttagaagcctggccgtcaatacccacaacagttatggaggcaagggaaacaggtccttgaaaagaaggtaatgtggagtgggtagcctccatattgattaagaaggggacggtcttaccctccactgtgagagttacctaaagctcggcatctgtgttggtctacagggcttccgaggtgatctggcagtgtcagtcttcagccactaagccgagaagatctgggaaggagtgagtcagagagtcttgggccagagttccaggggctctgggagtggctgccaggtgagttgaacagtctgattttcagtggggtcctgcacagacgggacacggtttaggaggaatcctgggctgcaggcattccttggcctggtggccagatttctggcacttgtagcaagctcctgggggaggtgtttctggaggaacgcctggccgctgcggttcaggcatttggaagttcttgtgtgctggagatgtggctggggtttgtctcacagtggaggcaaggaactgcaacttagaaatatgttgcttcttggctgcctctattctattattgtacaccttgaaggcgacgttaattaagtcctgttgtggggtttgagggctggaatttaatttttggagttttatttaatgccgggagcagattgggtaataaaatgtatattgagaataagacggccttttgaccttttagggtctagggctgtaaagcgtctcaggtttgctgccaaacgagccatgaactgggctggatttttatatttgatgaaaaagagcctaaacactatctgatttgggataaagaaaaaggagcattaaccttgactatgcctttagctccagccaccttttaagagtaaattgctgggcaggtgggggagggctagtcccagaatgaaacagtaagctggaccaggtgtgaggaggggaggtgataaaaggattatagagtggaggaacggaggctgaggaagatttgggacctagctcggcctggggaggaagggagaggtcagatggggctgtagaaaaggaagactagaaagactcagcgacgcttggggttgggactgaggggacaggtaggagggaaagaaggaagatttgggatgagttgcatgggaacagagactaggtagggactgatgtgtaaaagaatgcctggacgtcaggcacctcagaccatttgcccattctatgccaagaattatttagatcttgcagggtggaaaaattgaaagtgccattttctgactatttggaaccactgtcgagtttgtactggggtcaagcggcattgcagaggaatataaggcatttaggttttaggtcaggtgacagttgaagaggttttaggtttttaagaacacaggctaagggagaagagaggggaatggagggcggaaggttgcccatagtgaaggaagcaagcccagagaaaagagagagtagagacatggagggaaggggttcggggtttcttaccctccagacaagcgggaaaggggttggggcgcagaaataaggggttggggcgcagatataagaggtcagggcgcagaaataagggatcggggtacagagataagaggttggggcgtggaaataaggcaggcgtccctgagtggtcagacacctctgaaacgtgggtgaacaatcagagagatgtccctgcaatggggaggctgccttccgtagtccgtgaccagcgccggagttttgagtccacggataaaacgtgtctcctttgtctctaccagaaaatgaaaggaattgaaattaacagaagggagagattgaagggtggcgacaagattgaaaggagaaagtggttgagggatagtgagggaggttggagaagagagtaagaggccgcttacccgatttaaaattggtgagatgttccttggggtggtgggtctgaggacccgtggtggtaggtggatctttttcacggagcaaagagcaggagaacaggggattgatctcccaagggaggtcccccgatccgagtcacagcaccacatttcactcgcgtccatgtgaagacaccaccaaacaggctttgtgtgagcaataaagctgtttatttcacctgggtgcaggtgggctgagtccgaaaagagagtcactgaagggagactttgagtaggtaaaggaaaattacagtcaaagggggttgttttctggggggcaggtgtggagggggtcacaagatgctcagcaggggagtttttgagccaggatgagccaggagaaggaattgcacaagataatgtcatcagttaaggcaggaacaggccattttcacttcttttgtggtggaatgtcatcagttaaggcaggaactggccatctggatgtgtacatgcaggtcacaggggatatgatggcttagcttgggctcacaggcctgacaataaatataattatttatgaaaattacaaatattatttatgtatttatataaacaatatcatttatatataatattgtcatttatatataattatatgatgaatattatatttatatgtatatgcaaagttttgttattttccttttttgctaaaacaaagttggggccacagtctattaaatgcatgaactacatacatgttttttaaacgttatgtaaaattttatttgttgaccgaggtattagttcatagaagtacgtttgcttagcatacgcatcatttaaaacatccctgcgtacctcgatagataaaatgcttctcacatctgtagaaaaatacataaagcaataccaatatacagaagcagtcgcatctagtacacagatcacaacgtgcgcattacatagaccctctgtcgttcaacacgtgaaggaaagctgttgggttcgaaatcaggtttataaagtagaattggctcctggctaggcagagatgctattgcgaggctggtggaacactttttattctttcttttcctgtattttggagggtcagtagcctgcgaagctccttgtttctgttcactggagtcaggctgcggcaatttaggaatcaggcagtcactccggaggtcctcttagttatgcaaacctaggacgtgtcctcccccattaccctggagagcaatctgcttttgtttaacagagaccatccctttttaatggccaggtggagcagggttagtttgcataagcagtctttccaggaagaaaggaataaggtcccagccaagtacaccagcttttacactgtacatacatctgggtcgcctctaacctaggtcgctgcagacatcagctcttcaaagggggaaatcatagacacacgttgaacccaaggcaggacagccagggtgaaacattttgggggcagctttgattcagccttgaatgtggctgacaatctgagccctttatcaccctggacggtgaatggaaaagtgaatgctatttgggaaacaagggttgaatgggagggatataaagtaataagcggaaatccagtatctgcacaccctccaagcatcatagtcacagatgggtgcgggatccgtcttcagcagggacactgcttggcagcaagcagcctcagatttttaggacctgactctcagcccagtcctccaccccaagggcgctgagaagtaaaactgactcccttcgggaacatgtgatcctgaagttattttttggctatttccaagaagaactgtgattcctcaagagggagattctgaatttggtgctcaaaaggacaggagggtattttagaaggtcaactgtggaggaaaggggacgtgttagcattgtgaatttgtaaagcagatcatgaatttcgttaatttctgcattaatgcattaattgagtttgtatttactattttgccctctctgtaaatggcactcctgtcttctgagttgctcaaatcaaaaccttagtagttgtccttgagtcctccctgtccacagcaaacattcattccagggcacatcctgccaccctgagaagcacctccagttccttccggtacctgggtcccagtcactaggagcctgtgtaagggcatttgcaaaacaaaagtgagaggctgaattctccctgcaggagataaaggaccagacttttccccctctctttcttagagcattttgtttagaaaacctacaactggaagtactttctcagttcctttgaaatgtatgtggatgtttacaaaagctaaataagcctcctgtcagctttaagacctaggaatgtctttccttaggatctgaggccatctctttgaaatgcatcatcaaggaaggtagcgcccatgcctaccccttccaggaaaggacaggagcctaaatcttccgcaggcacctgactccaagttgcaaaacggcctcctttcataaggatgtacaaagtttattttttcttcatataaaaccacagctaccacagatgatcaccccaatttctgggtggatctagaacggactatgtgttgaccaagggttgtgttaagccctcttgctaggggactagttactgtttatcttgagaacaagtctgtaatgacttttatctgcttgataatgaaagagatttctttgcaatttcttagcagattgccagtgacatgaatcgcattctacttgaaagcctattcaacaataatagtgtttttatttttttctctattacttttgtggagaggtttttctgggtaggcagaagttttggttttaattatttatttcccccaacgcacttgcccgaacttccttcttgtctacccccagtgcaatccattctctgcactgcatctaggaagatctgctaagaaggcacatcggttcatgtcacttctttatttaaaaacccttgagtggattcccatcactctagctccacacctggatctgctggtcccgtgggatcagggccctgcctgccacacatccactgtgcctcacccacaccagcccctcattcttccttggaatccatgatctcattcctcacatgggacttctcactggctacacggttccctgaaatgctcctttatctggtctttgcaaaaatccttatttgggtcaccctgaaatgccagtttctcctccaggaagccagttcctcagtcacgctctcacatattaaactcttctattctctgttcacccccattctctttattttatttttttaaatttgtattttttttgtgacagagtctcactctgtcacccaggctggtgtgcagtgactcagtctgggctcactgcaaccgccacctcccgtgttcaagggattctcctgcctcagcctcctgagtagctgggattacaggcatgtgctgccctacccagctaatttttgaatttttgaaagagacggggttttgccatgttggccatgctggcctcgaactcctgacctcaggtgatcttgcccgccttggcatcccaaagtgctgcgattacaggtgtgaaccaccgggcctggactttttattttcttaatcatcaatatttacatggatttctcattcccctgacacactgagagctctgtctttcatggtgccattttagcggttgattaaaaatttttggaattagagttccaattctttctctctttttttgctgtagaaaaaagtgttttagaaagcttacaatttattgcttatagaacttttgtaagtgaattatgttaaggcaagagttattacctttgtggatgcaagtgaaccatgtattcatttttgtattggtgtaagtgaagatctaagggcagaagtgacttcaaaacagcacaaatatggtgagaagctgcctgggtgaggtgtcaggtgtgatgtctcatttgcccctaaatgtttgtgggatgcagggcaagggcagaaagaggctcacagaccatgtgatttgatatgtaaaagtcctcatgccttccttgacaaatgtacattcacagcgatgtgggtggtagctgtggtttgtagtcctcaggctccctggagagcatagctgaaattctgctacctggacgcagactcctcctgctcctggccccctccccgcctgcttgctcgtgaaccgctagcagtgaacccatgacattgtgacccctctgctgacttctcttatttccatgctccttgtatctctgacaaaccatttcagatacaagccaagctgtctaccctcaggaggagaggcccaaagaaaaggcccatccaaccctacgaggcaagctcaggtccatctgggccaggatgccagggtcttgaatacgcagaggatggcccaggacattctcccttccctgtggggagaacatcagccagaggtggcctctgagcctgggtcagcaggcaaggcccccgcccccagttctaaaatagaactgtggcaaacagttaaaccacatctcccaacagttgagattaacatgtgcaggcacagaatgaaatgttacactaaaaaaacaaaaccaacaacaaaaaaccaaattacacatagattcactaagaatcacaatgaaacctccaatctactgtacaaaattaggcaatgtcaataattcacaaggggggagcaggatctccatggaatccatgcattttcatagttccagaagggaagcatgtgctgatgacttaggaattctcaaccccattacaaccacctcccgaaatctgcaggtcgccaattgtttactttctacatcaacatcatcaaaccacacagacaacactcaagcatgaacaacaccggctgtgcaaagtggctcatgtctgtaatcccattgctttgggagcccgaggcaggaggatgacttgaggccaggagtttgagaccagcctgggcaaaatagtgagatgtagcggtgtgacaaacagaaattaaagaatgaagtatgaaaacaggagaagattttcattaaaacctttactgtaataggaagaatgaaattttaacttgcaattagggtgatgacacgttcagccttatccaggacagtactggcttgcacctgttgtctcagatagtgatgaacagcacccatgtttactcttaaaatatcccaatttgaataaaaattacataatcttcccacctatgaagtcctttaaaactggagtttcagaagaataagggaaatggctggaagtgtgagacagacaacagggaaaatccagtgacatcagtgaagcccctctgccaggtacgcctgtaatcaattccctcccttttttttttttttttttttttttgagacgtagtctcgctctgtcgcccagcctggagtacagtggcgcgatctcagctcactgcaagttccacctcctgggttcacgctccctcactctttttactcatgtcagcaatacttgatttgtttttatttcttaagataattttggtaaatttctattatttactgccaaacagctttgactaacacgttctctcccatctctgggccttttgcaaacgtgtccatagctagggacaattttaccctattctcttgttcacttggctaaattctacttactctgttaatcttaggttaaataccacattttcaagactgaggtccttgattcccgcagctctatgataaatgctgtttagaggctccctgaccttttctagtcagaaaaattgttccccgcactccacctcggtctgcttttaccttctctagaaggtgcacttgctgagctcagatgctgtaattgtcctgctcgttgataaaccaagtagcttcacagtgtgcagcgtacagtgggttctcaaaaaatgtttgtcgaatgaagtgtttaaagcacttagcccgagaattggcccctagcaggtattaaatagtaactattataagctgtatcatgatgtaacaaacgatatgaagaatcaagatgcactgtgagttctttttgttgctgctgctgctgttgttattgagatagagactcactctgttgcccagtctggagtgcagcggcgtgatctcagttcactgcaacctctgcctcctgggttcatgtgattctcaatgcctcagccacccgaggagctgcgactacaggcgcccaccaccacgctcggctatttttttgtatttttagtagtgatggcgtttcaccatgttggccaggctggccttgaactcctgaccttgggtgatccgcccaccttggcctcccaaaatgctgggattacagacatgagccatggcacccggcctgtgagatttaagaaaataaaagcaagtaactcaaatgatcaagtctcaaaaaaataagtttacaatcgtataaatacacacacacacatatatacatataggagataatgtaaacatgtaattaaaacattgatgtattaacttcaaacatgtaatgtaaattttgagtgaaaaagaaataatagacatttataataagctccaagaagcaagagaatgtgtttatttccgttttttttaaatctaatcaatttccatgtctaaacttcattagggaaaactttgtttgcaatttagtgatgtttattttgcaaatggctaatggcactgtgtttctatgaaatgtttagaaatggatcgaaaatgctattgcaaagccaactaaattatagacatgaaataaatgtcaaggacaaaattattatattttgcatgtcaggttaaaaactagtgaacagtatttcaaaaatgtaggttattataaaaggtagcatggtataaagcagactccatgtgaccaagtacatatttttgtttatttatttttaattatactttgttttagggtacatgtgcacaacgtgcaggtttgttacatatatatacatgtgccgtgttggtgtggtacacccattaagtcgtcatttaacattaggtatgtctccaaatactatccctccctgatccccccaccccacaacaggccccagtgtgtgatgtttcccttcctgtgtccatgtgtactcattgttcaattcccacctatgagtgagaacatgtggtgtttggttttttatccttgtgatagtttgctgagaatgatggtttccagcttcatccctgtccctacaaaggacatgaactcattattttttatggctggatagtattccatggtatatatgtgccacattttcttaatccagtctgtcattgttgggcatttgggttggttccaagtctttgctattgtgaatagtgccgcaataaacatacgtatgaatgggtctttatagcagcatgatttatagtcctttgtgtatatacccagtaatgggatggctgggtcaaatggtatttctagttctaggtccctgaggaatcgccacactgtcttccacaatcattgaactagtttatggtcccaccaacagtgtaaaagtgttcctatttctccacatcctctccagcacctgttgtttcctgactttttaatggttgattgccattctaactggtgtgagacgatatctcattgtggttttgatttgcatttctctgatggccagtgatgatgagcattttttcatgtgtctgttggctgcataaatgtcttcttttgagaagtgtctgttcatacccctcacccacttgttgatggggttatttgtttttttcttgtaaatttgtttgagttcattgtagattctggatattagccctttgtcagatgagtagattgtgaaaattttctcccattttgtaggttgcctgttcactctgatggtagtttcttttgctgtgcagaagctctttagtttaattagatcccgtttgtcaattttgggttttgttgccattgcttttggtgttttagacatgaagtccttgcccgtgcctatgtcctgaatggtattgcctaggttttcttctagggtttttatggttttaggtctaacatttaagtctttaacccatcttgaattaatttttgtataaggtgtaaggaaggaatccagtttcagctttctacatatggctagccagttttcccagcaccatttattaaatagggaatcctttccccattgcttgtttttgtcaggtttgtcaaagatcagatagttgtagatatgtggcattatttctgagggctctgttctgttgcattggtctatatctctgttttggtaccagtatcatgctgttttggttactgtagccttgtagtatagtttgaagtcaggtagcatgatgcctccagctttgttctcttggcttaggattgacttggcgatgcgggctcttttttggttccatatgaactttaaagtagttttttccaattctgtgaagaaagtcattggtagcttgatggggatggctttgaatctatcaattaccttgggcagcatgggcattttcacaatattgattcttcctacccatgagcatggaatgttcttccatttgtttgtctccttttttatttcattgagcagtggattgtagttctccttgaagaggtccttcacatcccttgtcagttggattcatatgtattttattctctttgaagcagttgtgaatggcagttcactcatgatttggctctttctttgtctgttgttggtgtataagaatgcttgtgatttttgcacattgattttgtatcctgagactttgctgaagttgcttatcagcttaaggatattttgggctgagacaatgcggttttctagatatagaatcatgtcatctgcaaacagggacaatttgacttcctcttttcctaattgaataccttttatttccttctgcctgattgccctggccagaacttccaacactatgttgaatagtagtggtgagagagcgcatccctgtcttgtgacagtttgcaaagggaatgcttccagtttttgcccattcagtatgatattggctgtgggtttgtcatagatagctcttattattttgaaatacgtcccatcaatacctgatttattgagagtttttagaatgaagggctgttgaattttgtcaaaggccatttctgcatctattgggattatcacgtggtttttgtctttggttctgtttatatgctggattacatttattgatttgcatatgttgaaccagccttgcatcccagggatgaagctcacttgatcatggtggataagctttttgatatattgttggattcactttgccagtattttattgaggatttttgctttgatgttcatcagggatattggtctaaaattctctttttttgttgtgtgtctgccaggctttggtatcaggatgatgctggcctcataaaatgagttagggaggattccctctttttctattgattgaatagtttcagaaggaatggtagcagttcctccttatacctctggtagaatttggctgtgaatccatctggtcctggactttttttaggttggtaagctattaattattgcctcaatttcagagcctgttattcgtctcttcagagattcaacttcttcctcgtttagtcttgggagggtgtatgtgtccagaaatttatccatttcttctagattttctagtttatttgcatagaggtgtttatagtattctctgatggtagtttgtatttctgtgggatcggtggtgatattacctttatcattttttattgtgtctatttgattattctctcttttcttctttattagttttgctagcagtctatcaattttgttgatcttttcaaaaaaccagctcctggattcattgattttttgaagggtattttagttatttctttccttctgctagcttttgagtatgtttgctcttggttctccagttcttttaattgtgatgctagggtgtcaattttagatctttcctgctttctcttgtgggcatttagtgctataaatttccctctacacactgctttgtatgtgtcccagagattctggtatgttgtgtctttgctctcgttggtttcaaagaacatctttatttctgccttcatttcgttatttacccagtagtcactcaggagcaggtcgttcagtttccatgtagttgagtggttttgagtgagtttcttatttctgagttctggtttgattgcactgtggtctgagagacagtttgttataatttctgttcttttacatttgctgaggagtgctttacttccaactatgtggtcaattttggactaggtgtggtgtggtgctgaaaagaatgtatattctgttgatttggggtggagagttctgtagatgtctattaggtccacttggagcagtgctgagttcaattcctggatatcctttttaacttcctgtctcattgatctgtctaaagttgagagtgggttgttaaagtctgccattattattgtgtgggagtctaagtctctttgtaggtctctaaggacttgctttatgaatctttttttgttttctgtttgcttggtagatcttcctccatccttttattttgagcctatgtgtgtctctgcaggtgagatgggtttcctgaatacagcacactgtagggtcttgactctttatccaatttgccagtctgtgtcttttagttggagcatttagcccatttacatttaaggtttatattgttatgtgtgaatttgatcctgtcattatgatgttagctggttattttgctcattagttgatgctgtttcttcctagccttgatggtctttacaattttgcatgtttttgcagtggctggtactagttgttcctttccatgtttagtgcttccttcaggagctcttgtagggcaggcctggtggtgacagaatctctcagcatttgcttgtctgtaaaggattttatttctccttcacttaggaagcttagtttggccggatatgaaattctgggttgaaagttcttttctttaagaatgtggaatattggcccccactctcttctggcttgtagagtttctgtcgagagatcagctgttagtctgatgggcttccctttgtgggtaacccgacctttctctctggctgcccttaacattttttccttcattttaactttggtgaatctgacaattatgtgtcttagagttactcttctcgaggggtatatttgtggcattctctgtatttcctgaatgtgaatgttggcctgccttgctagattggggaagttctcctggtttatatcctgcagagtgttttccaacttggttccattctccctgtcactttcaggtacaccaatcagacgtagatttggtcttttcacatagtcccatatttcttggaggctttgttccttttcattcttttttctctaaacttctcttctcacttcatttcattcatttgatcttccatcactgataccctttcttctagttgaccgaattggctattgagacttgtgcatttgtcacttagttctcgagccttggttttcagctccgtcaggtcctttaaggacttctgtgcattggttattctagttagccattcatgtaattttttttcaaggtttttaacttctttgccatgggttcaaacttcctcctttagctcggggtcgtttgctagtctgaagccttcttctctcaacttgtcaaagtcattctccatccagctttgttccattgttggtgaggagctgatttcctttggaggaggagaggtgctctgatttttagagtttacagtttttctgctctgttttttccccatctttgtggttttatctacctttggtctttgatgatggtgatgtacagatggggttttggtgtggatgtccttcctgtttgttagttttcattgtaacagtcaggaccctcagctgccggtctcttggagtttgcggaggtccactccagaacctatttgcctgggtatcagtagcagaggctgcagagcagtggatattggtgaacagcgaatgttgctgcctgaccattcctctggaagtttttctcaggggtgtacccagccgtgtgaggtgtcagtctgcccctactgggggatgcatcccagttaggcttctcgggggacagggacccacttgaggaggcagtctgtccattctcagatctcaagctgtgtgctgggagaaccactactctatgtaaagctgtcagacagggacatttcagtctgcacaggtttctgctgccttttgttgtctgtgccctgcccccagaggtggagcctacagaggcaggcaggcctccttgagctgtggtgggctccacccagttcgagcttcccacctgctttgtttacctactcaagcctgtgcaatggtggacgcccctctcccagccttgctgcagccctgcagtttgatctcagactgctgttctagcaatgagcaaggctctgtgggcgtaggaccctctgagccatgcacgggatataatctcctggtgtgccgtttgctaagcccattgggaaagtgcagtattagggtgggagtgaccggattttccaggtgctgtctgtcaacactttctttgactagaaagggaattccctgacctcttgtgcttcccgggtgatgtgatgcctcatcctgctttggctcacacttggtgtgctgcacccactgtcctgcacccactttccgacactcgccagtgagatgaacctggtacctcagttggaaatgcagaaatcacccatcttctgcatcgttcatgctgggagctgtagactggagctgttcctattcggccatcttggctcccatccaagtacacatttttatagaagacaatgactgagccgggtgaggtggctcacacctgtaatcccaggactttggggggctgaggcagaccaatcacctgaggtcaggagttccagaccagcctggccaacatggtgaaacctcctctgtactaaaaatataaaaattagctgggcgtggtggtggcacctgtaatcccaactactcagggggctgaggcaggagaattgcttgaacctgggaggcagaggtttcagtgggctgatattgtttgacagagcaagactaagtctcaagaaaaaaaaaaaaaaaagagaagaaaggaaggaaagaaaggaaggaaacaaaccacaactgttgtaacaatggcagtaggcagacactgtgccccagcagtacatgttgcagccatcccgaaataagttcattgtccccttctcctaactttttattgatgcttcagatctagctactatatctatagatatataaaagacatctcctttaggatttattgcatgcactaaaaaagctataatcttgccccttttgctttatgtctcctgacaaatgaaccaacaacactggctgtttcttacttttgactctgaatcccacttccaacatgtgtgccttgcaagaacacccacacttccagaactggatcctgcagccacccatatgcctgtcaacacccagaaagtccacctttgatgtctgcatgtttaaatcctgactcagaaaagggacatcttgtgtatgttatttaaccaaaggcatcttttcttgtaagaacactctgagtcacaggattcttattttaatttttcctttccaaggtagttatgttaggaggagatttttcaactcttagccaaaaaaattcacaatgcaaaaatagaatgttaactaacaaaattttacattatctaaaactcagtaaattgagaagagaaaataaaatatttgtaagagaattttcattactattcattcatttattccttcattcagaaatacttctgagggccaggtacagtggctcatgcctgtaatcccagcactttgggaggccaaggtgggtggatcacttgaggtcaggagtttgagaccagcctggccaacatggtgaaaccccatctccgctaaaaacacaaaaatttgctgggtttggtggtgcatccatctgtaatcccagctactcaggaggctgaggcaggagaatcgcttcaacctgggaggcagagttcgcagcaagccaaaaccgtgccactgcactccagcccgcgctataagagtgaaactccatctcaaaacaaacagaaaacttctgagtgcctactgcatgtcagttctactcacttgggacacatcaatcaacaaattaggatctctttccttgtggaggttagattctcaagggaggagataacaatacaaaatacaaccaagtaataaatgaaatattatggatatggacagtgacagtgcgttgggataaagaagacaggagtgtcgatggcactgagagtgctggggggcagttggtggtgatttcaggtgggctggtcatggaagttcccctgagatgatgacacatattttaagatagagacagaatcagccttgcgggtacctggggccaaggctactgagaaggagaactgaagtttctatcaaagaccctaaacggtgggcctagagccttgttggagaagcatggacatttctggggctggagctgagaagggggtggatgatgaggcttccaagggaggtgtgagggcgatcggtgggtggggtgaggggagaattgcaggcagctgcaagggacttggggcttgactcagtgatccaggggccattgctgggttctgaaaatgttacaagggcgtgaagcttatattttaaagaattaatgtagccactgtgttcaggacagaccatggagaggccgtgagaccaggtggaaggctattgcaggggcacggcaggagattggaggagactcagccatgggagatggtgtcgagtagacagacagggccccattctcataaattttataggtatgtccaataaggtttctggatgggctgcatgtgggatatgaaagacagaatatgagaatgaacagggtaaacagacaacctaaagaaagggagaaaatttttccaaaatatgcatctgaaaaatgtctaatatccagcatctataaggaacttggacaaatttacacgacaaaaacaaccccattaaaacatggacaaaggacatgaacagacactttttaaaagaagacatacatgttgccaacaatcgtggaaaaaagctcaccatcactgatcgttagagaaatgcaaattaaaaccaaaatgagataccatctcacaccagttacaatggctattactgaaaaaccgagatataaaagatgctggtgaggttgtggagagaaaggaacacttaaatactgtttgtgcaaatgtaaattagttcaaccattatggaagacagtgtggtgattcctcaaagacctaaagacagaaatatcattggacctagcaatccattattgggtatatgcccaagggaataaaatcattctattataaagacacatgcatgcatatgttcagtgcagcactattcaccacagcaaagccatggaagcaacctaaatgcccatcagtgatagactggataaagaaaacatggtacatatacaccatggaatactatgcagctttaaaaaagaatgagatcatgtcctttacaggaacatggatggagctggaggccattattcttagcaaacaaatgcaggaagagaaaaccaaatactgcatgttttcatttataactgggagctaaacgatgagaacacatggacacataaaggggaacaatagacactgcggtctcccggatggtggaaagtgagaaaagggagaggatcaggaaaaataactaatgggtactaggcttaatagctgggtgatgaatctaggttaggcacaaaggtactccagagctctagggaagccaagggcacctgctacttatatataaagcaggtatcttaaccacagcttttatgacaagacaaattattattccaagggctagggccatattgagctgaaaacattcttattagtatggactcatattccaggtattaacaaagacacctaaataatctgaaaggcgttttctaaaattaataacctgattacagaatggaagacgtatgcatttatgagtttctttgaaaactcatggatttctagttagcatgtgagctctgcaaagcaggaatcttgacttcgttcactcagtcctgcttagctctcagcatggaggctgcaggtttacggacactcagtaatcctgatggcctgaatgaatgagtgaatgaatgaatgaatgagaacccaggatgcatatcattcttaagtattcaaaagaattgaaattttcagtctgatattagcttttctttgtctgtaaggggtaggttattttatttaaaatgacattacaactccattacaatgattagttgttaaacatgatgtgtcttttctcatttgacatgacaaattcctcctcgagattttaatatgtatacaagtgaaatactggagtttctaccccatcctgaaatttactaaattggtgagtctaatgcaaatactaaagcactcactgattgattttgtgttaaatggtctaaaacatgagttggcaaactgtatactggaaatcaaatctggcccatcagctagtattgtagcttgaaagctaagaatggttttacattttttaaatggttaaaaaatatcaaaataaaatattaatttatgacacatgaaattcaaacacatctctgaccactcatacatgcgttgtctgtagctgcctttgggctacacagccacagagctgaggacctgccttggagaccacaggacctgcaaagcctaaaatagctactctctgactcttcagggaaaaggtttgctcctccccggtacagaactataattatgaaataatttttttgcatttatatggcatttttctttgcatgtatatggcatttcccttaccttgctctttcccattaattctcatgtctttgagttaagcaaattgaaaaagtgctttattatctgcttcctcaccctgaattgaactctttatgcatataactaggttatcattttctcaaagttgctcttcagggtgagatcctcgcccagaatagaaacgccacctctgtgaggctccctggctttgggtgttgcaggatcaatgggaaccagcagctggagttttgtgtcgggtgcctccgtgtttcagtggccgaacaggtttggaaaacacatagaaggagtatatcctccagccccatcggggtgcatcaactcagcccagactccagaggaaagacagtggcatggatacaagaacgttccacctaattaaggataaacattcctcatttcatttctgaaaatgtcagagtgcttcaataactacagagagggtccaccgagaacaaacccccctcgaagagcagaggctgaggatggctccagtgcttagggagagaaacatttttgacaatccctttctttatattttccaaagtaatacgtggttcttgagtattacacaaaacaaaatgagaacctcgacctacctcaagagttaggcaaggggctcttcgacttgacaacagaagcacaatccataaaagccaaaatgaataaatgagacttcatcaaaacagaaaagcttttgctctaaaaaagaccctgtgaagaggatggaaagacaagctacagactgggagaaaatgcttgaaagccacgtatctgacaacagactagtgtcttaaaaatataaagaatgctcaagactgaagagtaaagaaaaataaaatcccattagaaaatgggaaaaggaacaacaacaacaacaaacaaataccaaaaaaaacctttcactgtagaggaaacacaggtgagaactataaaacatgaaaagatgctctaaattagtagccattaagcaaataaatgcagagatatcactgcatccttataagcacacttaaatttaaaatttctactatatatgttttctaaatgatgtaaataccatagacaattttatatcgtctgtaaaatatcaaatgttgcataggaggcagaaaaacagaatcacgtacgcgttgctggtgagaatgtaaaatggtacagccattctggaaaattatttggcagttaaaagcaaaacattcaattctgcaattgcattcttgggcatttatctcagagaaatagaaacttacgttcccatgataaagataacaaatatggtgcagtatatacggcttgggtgatgggtgcgccaaaatcctacaaatcaccactgaagaacttactcgtgtaaccaaataccacctgaaccccaaaaacttacagaaaaataaaataattttgaaaagaaaacctgcgcgtgaatgttcatcacagctgtactcataggagtcccaatctggaaattacccaggtgtccttcggcggtgagtgattaaaccaactgctgcctccattccctggagttctctgcaggaatctaaaggaatatgccctggattcatgcaacaagccggccccatcagcacccacagaaaggtactgaatgaagaggccagtccgagagacgacacactgcctgattccctccacagcacatttgtgaaatgatcaaaagtctggaagtacagaatagatgaatggctgccagggattacgaaggcatgcgggccgaggtcaatgggtacggctatcaaagagcagcctgtgggatcctattcctgggggaaatgtcctacttattgatagtatcaatgtcaacgcgtgggctgtgatagtgaactctagttctacaggatgttactcttgggggaaactgggtaaagtgtgcacagggtctctgttttatttgttgccactctaagtggatctatgattaccccaaagtaaaacaagttcaattaaaaaagtaaaggttatgtatgtctgagttgcagtattcatttgaattatggacagtgaatgcaaaccattttatttctaaaattatgctcatatgaatatatatatatatatatatatatatatatatatatatatatatatacacacacatagttaatttcaaaattccgagaggttaaaacattgccaataagcgtcacagaagtcatgtatttctgaatgtacctttgtgatagaaggcaatatgaatctcatgattgtgaaactcctgacaaatattggtaaatctgaagatgacagtatccattttcagcatcacccattgctggggataatgaccattctcttggaataataataaatactaaaccaaagaaagtgtcctttccagttaacataattactgtttatccaagaggcgctataaatgctattacttcgggccaaatgaaaaaaaaaagaaaaagaaaaaatcaaaggacaaagattccctgttaaaacctctgaaaatgtgaaagattatagtcagtggaagcacaggtattaaagtagaggtatagacagaataagtgacattattcaagcaaacatggaatacctggtgtaatctgcccctcgagagttcattgtaatgtctcatagtggaaaatgtcctttaataagcttagtgtttaacaagtacttaatagttataaaaacatgccataatgtatacctattaaacataagtaaatgaattctacaatctacaaaaatgtatgtaatagaaataagtaaattacttttattttgtacaagagggaatgtgaacttcattgcaagagaaaactcagtaggaatcctatgaaaaagtttgttgttaattaaaagacgtaatattcaagaagtattatggacattacagttattaagctaggcaataaatctccttgacccataaattctcatttttgaattcatatgtcacctactttgtgtaataattgtccttatatgttttctcttgcatcatcaactgttattttttttcagagagtttcactttgttgtccaggctggagtgcagtggcatgatcgcagctcactgcaacccctgcctcctgggttcaagcgattctcctgcctcagcctcccgagtacctgggattacaggtgtgtgccaccacatctggctaatttttgtgtttttagataaaatggggtttcaccatgttggccaggctagtctcgaactcctggcctcaagtgatctgcctgccttgacctgccaaagtgctggaattacaggcatgagccaccgtgccaggccttgcttcatccactgttacagttgtattctaattcccctatgtatatatggatacattgggtctttgtttatctcagatgaattcaaagagccttataatcagttattggaaagagaatattactggtctatagtaaatgttcatttttggtaatacattcaagtaatttttgaaatttcttacaaataaatgttttaatatttttagtatgaaattatatttttgagagattgataacatatagttacccaaattagaaaatgtaaaacataaaaataggataagtgaatactgttcacaatagtatttgaatcacttatcccaattaagttcttaagatggcattgtaaagtcaactaactttctttaataaatgaattgtgacttctctgacacaaagacactaatagttttgctttcatcatgtgaagattagacatctgtgggaaaaccaagtatgtctcttctttgatgtgtaaaaatagtacactgtttaaagttattttaaaaacactttttacctaatggtaacgctaacatttaaactttgaatgcagcataaaattctattttttgcatcctcatgaaactgaaagatccttaatttgtttatttaaagagacttcagtttttttcatagtaacaatgaaacgaaatttgaaaattcaaactttatttcccagagatccttttctaaacatttattcacctcaataatatgattaaactgattcccagctttctagcaggtatgaacaataaaaatctgtatattgacacaaggcagacttgaggtgaggaagtaattattagatttcttaggaaacattctctgcgaattcaccagttctttattaacaataagtacctggtttggaatttcattatgttatggaaacctcaggtggcgtagtaatgtgaagatctggtattataacattagtgtgatacagtgctatttacttgtgttctatcttttcctgtttctaagtcaaaattccactcgctatgtgcctttttgccacacaagtgtcaggagaatcttatttctgtcagtttgaatcgagtgaggtgatcaggaggccaaagagagggaaaaatctaatttgagaactgcacactgaatcatttaccacgtaatgcttccctggagtggatatgcctctagaacagagaataaatattaacaatcatttatatttgcagaaaacgtataaatcgaactgcttttgtgtttctttcttctaagggaagtactcatcaaaactgtggggtcgtaaaaagagtattgtgtcctaatttaacttaattaactaggaaatgattgctaatagagtttaatctacatgattaagggtacatagctagtaaagatgaggctaaacccaggccagaaacagtgcctctgttttgcctactgtaaaaactatactgatactatatgtgtgggtgggctgtgtgtgggtgtgtgtggcctgtgtgtgtatacatttttcttgtactcagtgtcagaattgctaacatcggtatagcttatatattctttaataacgatgaatgctgctaagtatattaccagggtctgcaccccagctgtattttaaccacctctgtgagaatttaaattatatgggaaaagcatctttagggcacttcagaaggcaattcaacacaaatctgttgaatagctgctcttgtagctggcaccatgttaaggattgtcactattagagcagagatattaaaaatatttaaggaatttacactctcactagaaccaataactaaaaaataagaatcagaaaataagcacagacacataacgaagaaataatgaaaaaacaagggaagacaaaatgctactaagtgtcaaatgtgaggcagaggaggaagaaatggtaaacgcagaaatcagtgcgaagtatgtatgacctgtgcacgcacgatattcagcaacagccaagcgtgataaagataatttctatgaatcttgtgaaggggggagtgtaagaatcatattaaatgggtcgttatttactctcagggatcagagacgtttcctaaacagagtggtgtttaaccgcaacctgtcatgagaacagaaggggctggagaagggagtgagtcttagagagagggagtagcacactcctgttacctgggaatttgaaggctcaaaaacagcaaagaaataatctgtcaggaaccaagagtgaaggagaggagtgaaggtggagaagcccagtgctggccaacatgaggtcgtgctaggattttattctaatataagtgagaatctgaagaggtttttttctcaaagcagggccctagcttttacctttccttctgccagcatggcctttcttcagcatgactttgatgcagttgcaccctccacacagtccttcagactagggttttgcttggtggagacctgggtgatgcagtagctcaggtggggaagagaaaagcggactgagatcagcttctccatctccttggaggccacaagcaggaaattcagcacttggccagggaaaggggtccagttttggatgcgttatttttagatgtctgcaagatgttcaaatgaacttatctaattggcatcttacaggttcatgaggtagacatgagctggaaatagagagctttgaagttattaccttatgaatccatgtccatgcctgggggaaaaattaatttgcaaagagagagtatgtgcagaaagcagacctgatgtcctgagaccaaccctccaggacacctgcctctcaagggcaagcagaagacaagaggcaaaatagtggccagggagtcagggggctcccgggatgatcatgaaaacctagacgaaagagggttgtaaggcggaaaggcagtagcaccacagttctgcaaggggccgtttaagagaaccacccggccgggcacagtggctcacacctgtaatcccagcactgtgggaggctgaggcgggtggatcacctgagactaggagattgagaccagcctggctaacatggcaaaaccccatttctatgaaaaatacaaaaattagccgggcatggtggtaggcacctgtaatcccagctacttgggaggctgaggcaggagaatcacttgaacccaggaggcagaggttgcagtgagccgagatcatgccattgcattccagcctggtggcagagtgagactccctctcaaaaaaaaaaaaaaaaaaaaaaaagccaggcatggtggcaagcatctgtaatcccagctactcaggaggctaaggcaggagaaccgcttgaacccaggaggcagagtttgcagtgagctgagattataccactgcactccagcctgggcgaaagagtgagacactgtcttaaaaaaaatcaaaaaaaaaaaaaaaggaccaccctcagatgaattggttgaggtgcatggtatttatgacagtgacaagagcagtaatcacagagtgatgagtgtagaaacacaaaaccagctgggttgtggaataacttagaggtcaagaaatgcagacagccaacatagactaaggtataaaattttgctctaaaaggagaagacaaacaagctgacactcatatgtgaacgatggtagttttaggtattatttttaaatgtcagagacttgagcatatttacatacaagaagcaagaagccagagagagggaagggtgaaaatcaggagagaaagaggcttccacccagaggtcgtcccgcggcagccagcgggaatgtctgctggaggaccaccactgcctgggagaggggtcagaattcccaggtaacaggagtgagaaacagtggctcactgctagcttgcatgaccgttggaaggaagtgaagggaaaccccctgatagctttgcgtctcacaaggcgtgatatcccactgggtcatatcccacaagatcatctatcgcgtacgaaaggggtgttgatgcattggaagatttgaaatacaaaggtgcgttggagcaaggcttcgctgcaacaatagatgatggcagttgagcagttgcgtggttggtggccgtgcatgtacactggtaaacaagctgccaggcgtgaggtttcctcaggagctctccggagtccagaggagagaatccaggcagatgctgggccagggagcttccagcacaagggaatgtaacacactggtaagagactttgaggatggcatcgctgctgataggaaagaaatgtgtcccggcaaaagcaaagagccaacatacagtgaggaagcagggatggaaagagaagcagcagtatagagtaacgggctgacatctgatgttttgggttacccggtgggtggggcacactacatgcctcccacagcagctgatgggagtggagcggggagaccaaggggtgcagaggccggggctgatgtcacccagctgggccaaccattgacgggatgtgcaggaccctggcagggccatagggacctgcatagagtcctaactcactggggtgggagatcaaagggcagcagagggcagagcctcagaaatgaggattatgccagaggggaacaggattccatgaagacagggtcattgccctgtgtgggctcagttgcctctgtctgcccttcctggtagttttatgagggacgggccaatctttgccttccacagcattgatctccaatgcccatggggtactcagggcacaataggaagagacgggatatttgtaggtgaatgtatgaactgatatctgaatgaatgaatgaatgaatgagtgaatatcgaatggtaagtttgttgcttcagaatgattacactagtgccatcatgcacacaatgaggccagggcgactttctcccatcagggtgtggtcagatggttcatttcctatttttttttttttttttttttttttgagacggagttttgctctgtcacccaggctggagcgtgatctcagctcactgcaagctccgcctccgaggttcacaccattctcctgcctcaacctcccgagtaactgggactacaggtgcccgccaccacgcccagctgatttttttgtatttttagtagagacagggtttcaccgtgttagccaggatggtctcaatttcctgacctcatccgcccacctcggcctcctaaagtgctgggattacaggcgtgagccaccgtgccaggcccagatggttcattttaatgtttgtcttggtgactggcattttttgtgttctcattactgaaacaatttatttccgaataacatgtttttaaagacattgtgataatccagtgaattaaatgtggaccatttctttctccatggggtactgttgtctacctctgcctacctactcctgtgttgattgggagtttgagacttatcagaaaattttatgcccagggtcctgggggacagtggggcctgaaatgactgttgcctgaggtatggacaaacacccttccaacatgagctggattcatattagcagaaaggtggccataagtgatattccagctagtattttttatagaaagaagctgatattctattgagtaataagtattaaacctccatcctcaagaataggagaagtgccattttacatgtcttgattctctccttcgatttgtaatcaatctcgctaatgttagagaaaatgaatcagagctaaaatcctgtcatcccccagtatacaagacttagaacttcagctaaaccagcatcttactttcaatcaattcaacacgcattcttcgtatctgtgtcatggaccaggtgtccacgggacggaaagctgaatgcagctgtctttgggcctatgctgttcacaatctatgatcctaagtggtcaatcataaaaatgtgcggccagttctctgccagtcccatgaggaagatgccgagagcagaggggagcgatggctccagctacgcttgtcttgtgctgcccttcataggcagagaaacttggaccatcaaccacacaggcttacggctggttttctcccataaaacagtcccagcctgttctgccatgggcagcaccaaaggcctctcctgtaataaacaacaaatgatgttttaaaatgaaaatgcacctattaagttatctttcaataaagtagggagaggtgtcatgtagctgttacattactaccactatttacggagaaatcaatctcgcaaaacctgagaatgaaacatggttgcagagccatttttccctgggactgggggagctgacagtgccacactgagcgtttatttaacccccagagtaaaggtcagctttgtgtgctgaactccattttcgtgagttttatgcatgattaaatggtaattaagctttaatgaaaagtgtcaggctgattacaattaacataattgcagtagtcagttcatgtccttctgttttacatgctgtgcagagctggcaggacagtggacctttaatggggtttggatatctcatgagcctctaaagctcctttttctagtggagaaaatttagtcttccataaagtgaaggtaaacgcacataaagcaaagtttaggtcacaaccctactccattgatggccatcaacatgcacgtagacatgaagcatggaagatgagcaaggactttctctaacctcttctttttttttttttttttttttgagatggagtcttgctctgttgcccagggcgaagtacagtggcactgtcttggcccactgcaacctctgcctcccgggttcaagcgattctcctacctcagactcccaagtagctgggattacaggcacatgccaccatgccttgctaatttttttatctttttatttttagtagagatggggtatcaccatgttggccaggctggccttgaactcctgaccttgtgatccgtctgccttggcctcccaaagtcctgggattacaggcatgagccactgcacctggcctttccatcctcttactagacagttgttgctgcctcaagattattttaaagcagtgaaaaaaaatgatcagttttaatgaagaaaatttaccaggtgatagattaaaaactatggttacttaaaaaatgaccattgaacttcataaaactattctgcctgatttccaactggtatcaaaattttaagtgatcaagagtaaaagaactttatcaagaattataacacttaacaggtcgacacagatgcagcccttttattatataggtataatgtgttctttactcatcaaagcaagtctacagtatcaagtacttctgataataaacatacaaaaccatttactttaaactatttatcaacagtggatgtaaaataatccagaggggaaggaactttgctatttgtattagtctgttttcatgctgctgataaagacatacccaagactgggtaatttataaagaaaagagttttaattgactcacagtttcacatggctggggaggcctcacaattatggcagaaggtaagcaggagcaagtcacatctttttttctttttttttttaattttttatttattattattatactgtaagttttagggtacatgtgcacaacgtacaggttagttacatatgtatacatgtgccatgctggtgcgctgcacccactaacttgtcatctagcaataggtatatctcccaatgctgtccttcccccctccccccaccccacaacagtccccagagtgtgatgttccccttcctgtgttcacgtgttctcattgttcagttcccacctttgagtgagaatatgcggtgtttggttttttgttcttgcgatagtttactgagaatgatgatttccaatttcttccatgtccctacaaagcacatgaactcatcattttttaaggctgcatagtattccatggtgtatatgtgccacattttcttaatccagtctatcattgttggacatttgggttggttccaagtctttgctattgtgaataatgccacaataaacatacgtgtacatgtgtctttatagcagcatgatttatattcctttgggtatatacccagtaatgggatggctgggtcaaatggtatttctagttctagatccctgacgaatgtccacactgacttccacaatggttgaactagtttatagtcccagcaacagtgtaaaagtgttcctatttctccacatcctctccagcacctgttgtttcctcactttttaatgattgccattccaactggtgtgagatggtatctcattgtggttttcaatttgcatttctctgatagccagtgatgatgagcattttttcatgtgttttttggctgcataaatgtcttcttttgagaagtgtctgttcatgtcctttgcccactttttgatggggttgtttgtttttttcttgtaaatttgtttgagttcattatagattgtggatattagccctttgtcagatgagtaggttgtgaaaattttctcccattttgtaggttgcctgttcactctgatggtagtttcttttgctgtgcagaagctcttcagtttaattagatcccatttgtcaattttggcttttgttgcctttgctttttgtgtttgagacatgcagtccttgcccatgcctatgtcctgaatggtaatgcctaggttttcttctagggtttttatggttttaggtctaatgtttaagtctttaatccatcttgaattgatttttgtataaggtgtaaggaagggatccagtttcagctttctgcatatggttagccagttttcccagcaccatttattaaatagggaatgctttccccattgcttgttttactcaggtttgtcaaagatcagatagttgtagatatgcggcgttatttctgagggctctgttctattccattgatctatatctctgttttggtaccagtaccatgctgttttggttacggtagccttgtagcatagtttgaagtcaggtagtctgatgcctccagctttgttcttttggctcaggactgacttggcaatgtgggctcctttttggttccatatgaactttaaagtagttttttccaattctgggaagaaagtcattggtaacttgaaggggatggcattgaatctgtaaattactttgggcagtatggccattttcacgatattgattcttcctacccatgagcatggaatgttcttccatttgtttgtatcttcttttatttccttgagcagtggtttgtagttctccttgaagaggtccttcacatcccttgtaagttggattcctaggtattttattctcttcgaagcaattgtgaatgggagttcactcctgatttggctctctgtttgtctgttgttggtgtataagaatgcttgtgatttttgtacattgattttgtatcctgagactttgctgaagttgcttatcagcttaaggagattttgggctgagacagtggggttttccagatatacaatcatgtcgtctgcaaacagggacaatttgacttcctcttttcctaattgaataccctttatttccttctcctgcctaattgccctggccagaacttccaacactatgttgaataggagtggtgagagagggcatccctgtcttgtgccagtcttcaaagggaatgcttctagtttttgcccattcggtatgatattggctgtgggtttgttatagatagctcttattattttgagatacgtcccatcaataccttatttattgagagtttttagtatgaaaggttgttgaattttgtcaaaggccttttctgcgtctattgagataatcatgtggtttttgtctttggttctgtttatatgctggattacatttatagatttgcgtatattgaactagccttgcatcccagggatgaagcccacttgatcatggtggataagctttttgatgtgctgctggattcggtttgccagtattttattgaggatttttacatcaatgttcatcaaggatattggtctaaaattctcttttttggttgtgtctctgccaggctttggtatcaggatgatgctggcctcataaaatgagttagggaggattccctctttttctattgattggaatagtttcagaaggaatggtacaaattcctccttgtacctctggtagaattcggttgtgagtccatctggtcctgcactctttttcgttggtaagctattgattattgccacaatttcagctcctgtttttggtctattcagagattcaacttcttcctggtttagtcttgggagagtgtatgtgtccaggaatttatccatttcttctagattttctagtttatttgcatagaggtgtttgtagtattctctgatggcagttcgtatttctgtgggattggtggtgatatcccctttatcatttttattgtatctatttgattcctctctgtttttttcttagtcttgctagtggtctaccaattttgtggatcctttcaaaaaaccagctcctggattcgttaattttttgaagggttttttgtgtctctatttccttcagttctactctgattttagttatttcttgccttctgctagcttttgaatgtgtttgctcttgcttttctagttcttttaattgtgatgttagggtgtcaattttggatctttcctgctttctcttgtgggcatttagtgctataaatttccctctacacactgctttgaatgtgtcccagagactctggtatgttgtgtctttgttctcgttggtttcaaagaacatctttatttctgccttcatttcgttatgtacccagtagtcattcaggagcaggttgttcagtttccatgtagttgagcggttttgagtgagattcttaatcctgagttctagtttgattgcactgtggtctgagagacagtttgttacaatttctgttcttttatatttgctgaggagtgctttacttccaactatgtggtcaattttggagtaggtgtggtgtggtgctgaaaaaaatgtatattctgttgatttggggtggagagttctgtagatgtctattaggtccgcttggtgcagagctgagttaagttcctgggtatgcttgttgactttctgtcttgttgatctgtctaaagttgacagtggggtgttaaagtctcccattattaatgtgtgggagtctaagtctctttgtaggtcactcaggacttgctttatgaatctgggtgctcctgtattgggtgcatatatatttaggatagttagcccttcttgttgaattgatccctttaccattatgtaatggccttctttgtctcttttgatctttgttggtttaaagtctgttttatgagagactaggattgcaacccctgcctttttttgttttccatttgcttggtagatcttcctccatcctttcattttgagcctatgtgtgtctgtacccgtgagatgtgtttcctgaatagtgcacactgatgggtcttgactctgtgtccagtttgccagtctgtgtcttttaattggtgcatttagtccatttacatttaaagttaatattgttatgtgtgaatttgatcctgtcattatgatgttagctggttattttgctcgttagttgatgcagtttcttcctagccttgatggtctttacaatttggcatgattttgccgtgcctggtaccttttgttcctttccatgtttagcgcttccttcaggagctctgttagtgaaggcctggtagtgacaaaatctctcagcatttgcttgtctgtaaagtattttatttctccttcacttatgaagcttagtttggctggatatgaaattctgggttgaaaattcttttctttaagaatgttgaatattggccaccgctctcttctggcttgtagagtttctgtcaagagatctgctgttagtctgatgggcttccctttgagggtaacccaacctttctctctggctgcccttaacattttttccttcatttcacctttggtgaatctgacaattatgtgtcttggtgttgctcttctcgaggagtatctttgtggcattctctgtatttcctgaatgtgaatgttgacctgccttgctagattggggaagttctcctggataatatcctgcagagtgttttcctacttggttccattgtccctgtctctttcaggtacgacaatcagacgtagattcagtcttttcacatagtcccatatttcttggaggctttgctcgtttctttttattcttttttctctaaacttcccttctcgcttcatttcattcatttcatcttccatcactgataccatttcttccagttgatcgcatcggctcctgaggcttctgcattcttcacgtagttctggagctttggttttcagctccatcagctcctttaagcacttctctgtattggttattctagttatacattcttctaaacttttttcatagttttcaacttctttgcctttggtttgaatgtcctcctgtagctcagagtaatttgattgtctgaagccttcttctctcagcttgtcaaactctttctctgttcagctttgttccgttgctggtgaggaactgtgttcctttggaggaggagaggcactctgctttttagagtttccagtttttctgctctgttttttccccatctttgtggttttatctacttttggtctttgatgctgttgatgtacagatgggtttttggtgtggatgtcatttctgtttgttagttttccttctaacagtcaggaccttcagatgcaggtctgttggagtactcggccgtgtgaggtgtcagtctacccctgctgggaggtgcctctcagttaggcttcttgggggtcagggacccacttgaggaggcagtcttcctgttgtcagatctccagctgcatgctgggagaaccactgctctcttcaaagctcagatggaaatgcagaaatcacccatcttctgtgtcgttcacgctgggagctgtagaccggagctgttcctattcgttcatcttggcttctccgactgcaagtcacatcttacatggtggcagagaagagagagcttgtgcagggaaactcccatttataaaaccatgagatctcatgagtcttattcactatcatgagaacagcagaagaaagacctgctcccatgattcgattacctcccactgggtccctcccatgatacgtgggaattgtgggagctacaattcaagataagttttgggtggggacacagccaaaccgtatcattattaaaatagcagttacatatttattaaaggctttactatgaaaattttgaattaagctcagctcaattacaaagcatattgtttacagtagatgaagaggtattcattatgcaaagtcatactaatattttcaacatttatgcacgtggaaaattttcacgcatatctaattagcagacacttgttggatattgattatatgtcatgttctaggaaaacaaagaccatctgccctcaagtaacttaatccactgtattaataaaatggtaacccacaatgggctaagcactattatagaagtataaacattgtgtttggggactggaagtgacaatgtgattgtcttcgctaaagaaacctttgaatgtgagataggcacactggaatttcttgtgcaacaaggcggggaaggtcagtccagtgtgtaacaggaacacacatccaagctgagagaggctagcatctgagtagaggtttctgtaggctttgccagagtggaggatggtgattgaggatgatgttgaaaattgcttaggggaagttttcagagggttttgtggccttatttttggcagtggggagaatgagaagtcaccctggctgagatgagaagataggggagagttctaagcagaagtgaggcgttgcccacgttgctgcggaaaaggttcacctgggtgcctgtgcgcaggtgggccagaaagtacgcaggtgcatgaagaaggaagcccgtgagcaaggcagggcagctcagacccccagcggcgtagaccaaggcggcagggcacaggttgggagaattggattttggatctattttgaatagggactccactgaatgcattgttggattctctgtgtggtgtgagatctacagaggtctaaaaatggctccaaaagtttcatcctgacagcctgagccactggcaggatggagttgactttaccaaaaccgggaagatgtcaaggggcccaggattgggaaaagcatgaacaaggactgtggttgagtttcaggtgttgagttgcctctctgcatctctgcagcaaagcagagacatcaagaaggcaggtggacactcaggggagaagcctgggaggctggctggtgtttccttaggagtaccagaattggacatttattaactagtaatgggattggggggatgaattatgtccaagggttacattaaaccacatggaattgccaacattccatcatttcttccctacaaaagtgacaattttatacagttcaaattggtacacatgaaaagctgagtaaaagaaaagtaagcaagcgtcatttctgcagaaaccttcgtgggtatcttaatgtttgttgcttcttaaaaaatatatggatagagaagaaagggagacccaaggacaagccctcctggcatctgatctttagagtttcaagggaaaaaatatatgaatcagccaaagagccaatgatagagtgacccttggaataaggaggaacaagagagaataataagatgaaaaacaactgaagaaagagtttccagaagagagagtcaaataagtgtttaaaaagctccaatgtaacatggaattacaagatagagaggtagtgcaaccctgatgttaaattattttttaaaatgtacttcaaagtgtgcttgggaaaaatatagtaattcaaatgtgtccaagaaaacaaatattcacataactattttctctccaataatttaatcacacctctaatgcttatttcacatgttactgacatagaatcaagtaaaaatagcctactaagaaatctcatttaatacaattgaataaatgtcatttttgcttggaaacaatggccacacttaaaacatcaatcatatgaggaaaacatttctttttgagttctatttaaaaatttttaaaatcataactaattccaatgttttaaattataaaattagcatggtttatgaatcacaacacaatctaatttataggtaaagttcctcgttttttttttggtcccaggttcataaagacaaaaaaatgagagatttccatcttcccacccatcctcccacctacaaaagagtagtgatggcttcttgggtgtgatggacaggctgttttgcactttgtgaagagtttcccacctttggtttggaaagacaccagcttgatttagtttcatggctggattcgccagtgaggggacgaatgtgggtggagtgagagggacataacagcccagtttcttcctgcagtgaagcagggtaactgggtcagtttcttaattacgactgaggggttataggaaccttcttttctaaaactagaaaaccaggacatgatttattccaggtgtaggagtcaaatgtttatcaggttctcagggagatggagactggtgcccgattctcactggttcccagaagtggcaagctacattttgtggagagtagctgaatgactggctttggggtggtcagaccagcgtcttcgtgttccagcctgagatccttagagagaaacacatgacatgaattactgtggccgcccagaccgttggcccccaaatgagagcacgagggaatataatgactagtggagaggcaggaccatgtccctctctggactcaccacactgaatcatccagcaactccctggccatccaaaattggcagcagattttaaaaatagactggtattggacttcttgtcaactcgaatgcatgggagctagaactggatataatttgtcttaggaaaatgacttttattttacagccctgattgtagtacactcacaggcatttcatatgcttgccaaggtcctttacagaactgtattttttaaaatgccacatggtacgtatgacaatcccagtgggataatttgagagtttcttgcctaaggttgggtttggaaattctaggaagaagggattatattagtctgctctcatgcagctaataaaaacatacctgagactgggtgatttataaaggaaagaggtttaattaactcacagttcagcatggctggggaggcctcaggaaacttacaatcatggaggaaggtgaaggggaagcaaagcaccttctttagagggtgttagaaaggagaagtgcaagcaggagaaatgccagacccttataaaaccaacagatctcatgagacttacttattgtcatgagaacagcatgggggaaactgccctcatgatccaaccacctccacctggtcccacccttgacacatatggattatgagcattacaattcaaggtgagatttgggtggggacgtagaacctaaccgtatcaggaaggttacttggaattagtacagagatccggaaagagatggtcaatgcagcagcttgagcaaagccgtccgtgttgatcttggggcacatcggcccccggggtacctgaagagagaggtactaggcctctgtgccctgacatgccctcctgccccatctcttcacccatgctggggcttcttattggaataacccaatacaggtttgcctcgagagccacagagtagttaaaggaagagaaagtagtagatttggggccaaagggaaaataaatgacatccagcgtggaattatggaagacagaaatgtccttagaaattgatactctatcctcatttcataaataaagtaaaaataacagagacaaaaggtcagtctcaaagcattagaggtcaagatagaaactcacatttccagagttgtagtctagactatgctttttaaatgttgtaccactctaagtttttatatcttgtttttcctttcaataaacttctaaagacaatcttgcagaaaatccttcatttaaatgcctcagagtcaatgttatattctagcccctaaatgagtatttctgaaaatttataccagaatttggatttattaactagtgatagggttggagggatggatcctatccaagtgttacgtgaaaccatgtgaaattgtcaacattcaatcattttttacgtataaaaatgacaatttcatatgattcaaactagtacacatggaaaactgagtaaaaaatagtaattgtcatttctgtagaaactttcatggtgtcttcatgcttatttcttactaaacactaataattaattatatgagaagaaacatttccatgatcctcaaataattataataaagggtcttcttctttttttctacccaagttagaaagatgttctctgaagagagaatcatgaatatatagaaaaaaaagaagtgatggccaggtttcaacagtgattgttaaaacaggaagattttaaaaggccaggagtaaaatgaagtacattctttccacataatccatgaaccctcttcttaggtatctagtcaggtgaactgaaaacttacgtccacacaaaaacctgcacacagatgtttagaggcagctttaggcataattgccaaaattttgaagcaacccgtatgtccttcaataagaaaatgggtaaacaggctgggcgaggtggctcacgcctgtaatcccagcactttgggaggctgaggcaggtggatcacctgaggtaaggagtttgacactagcctggacaggataatgaaaccctgtctaggctaaaaatacaaaaaaatagccaggtgtgttggtgcgtgcttgtaatcccagctactcgggaggctgaggcaggagaattcctggaacccaggaggcagaggctccagtgagccaagatcatgccactgcactccagcctgggcgacaaagcaagactccatctcaaggaaaaaaacgggtaaataaactgtggtacaacaagtcaatagaatattattcgctgctaaaaagaaatgatccgtacagccatgaaaagacctggagcttgaaagtgtcttactaagtgaaagaagacaacatgaaaggccacacactgcgtgattctaactctgtgactttcaggaaaagacaaaactatggagacagtgaaaagagtgattgctaggaattaggaggaaggaagggatgaacaggcagaacacagggaattgttagggcagggaaatgactgttggtgatgttattactacagatgcatttttccaaactcattgatatggtttggatctgcgtccccacccatgttgaattgtaatccccactgttggaggtagtgcctggaggggttgattggatcatgggggtagtttctaatggtttagtaccatcccccagtgctgtcttcatgatagagttctcaggagatctgattgtttaaaagcacgtagcaccttccgcttcactctgtctttccccttccccggtcgtggaagatgtgactgcttcccctttaccttctgccatgactgtaagtttcctgaggccctcccagccatgccttctgtacagcctgctgagttgtgactcaattaaacctcttttcttgataaattacccagtctcagatagttctttacagcaatatgaagatggaataatatacccatggaatgcataacaccaaaagtgaacccggagaaaactgtggatatcggctgataatgatgggtcagtgtaggttcattgattgcaacaaatggaccactctgtggggatgttgacagggaggaggctgtgtgctgtggacagagagcacgtgggaactctgtgccttctactcaatcttactgccagtgcaaaactactctaaaaaaataaaacctgttgaaaaaaatgcctggagaatacagaatggaaagaagaggaaaatgaacataatctcataactttctcaacttttttgttttgctaaataaggccaatgaatcacaattctaccatctgctcttgccaccatttcaaaagattaagaaaattttatatcacaacaaaaaacaagagtgatataattttggagtaaaggactttttttcccccaaggcaggatagttggaacactcttactttcatattttttgtgaaggaccagtgaaaattttaccatgtacaagtactattccacaggcacgtgtttgcaaatcactgttcagagcacagtgaaaccagaggtaagaaattgtgcagactataaccagaggtaagaaattgtgcagactataacctcaattatattagcaaccttttaaagcattaaactgacctaactcaattttcttatgtaaatcctaaatatgacttgtcagtgagctgccaagagataaattgagtctgaatgtgtttgtgtgcaaattccacttgttttatgatgatggctgaccttgtgtgctgcccaataatatggcatctctccacggtgccatccgaagggcactaaaaggctgaactgccacaaaatatctccactccttcctccttcggaaacctttcatcaaaaatgggctagacagcaaaaatggcaactatctttaggagattatagttcacgtgtgcagatgtggtttcacactagtaattcagcagaggttcctctgtcatattagcttcttgaaactttatccctaaggtggaaaaaaaattcacggaccgtcctgaaccgggaagttgcaagcagagaatcaaagcgtgtttgattagcaggttgtttgcagagagacttcattacataaagaaagtgtcagactggggcatgtagggaacctggaatcggggctgggttaggggagccctgaagataggctctacatttatgtagagacccacacctgtcttgcatccaagtctagaaatttactgactaattgaaacctttaaagtcgtacgtttttttttttatgtaactaagtaggtccattgctggtcctgatcttataatgaaaagaattccctaaaacaaaattttcctttgatactgacagtgttcagaaccactccaaaatatgcagttttgaggaaactgcagaagcaggaaagccactccagcctctacttgccccttctgccctgaagcagggcatagaataattctctggccttccttggaagcaggtcatgaaaccttcattccagaaggacactcccaggatgcagaggaaaggaatgaagacatagacacacagggaagaagctgagcaaaggagacttaagttcctccccgtttatcaccactaaattctatcttttcgtcctctaatcatacttctgcacgactatacattaaaacacacaattttctctctttctttgggtcttcatttctgaaggttccagtggcatgcaaaatgcacatcaaatgagtttggttatgcatttctcttaagctggcttctgttatcgtggcctcagccatgaacccagcaatgggggaagagaactcttctctgcaacatgcattttcctaacttcaaattaggctcaataaattgcatctgtgtaaggagacgctggtgaatataaatggagggagatctgtgttcatgacaagactttgatatcaaggtaaagaagaagcacgctgtgccacctactggagaactggatggagaagccagacttgctgatgaagaagtcgctgtcgaactgcagggtgagtgagttgaaggtgctgtggatgtcctccggaagggcggagccactccactccttcagcaggatgtcactgtccaccggcccgtcccagaccttgaggatgtcgtgagccatctccgtgtcgaaaacaatgaaatggaggctgcaagagagaacacagtagcgctacttgccgtgcatcgagcatgtcctgaccccatagctgtaaagtaagcaagctcatttcgctttcacacaacccccaccaacatgtgcctcggtacttactgtctgacaatgaaggatgaggaaaatgaggctcaccgaagataattcaggagtgtaaattaggataaagcacacaggacctcagtctgtcatggacgcagagagataggtgagctagatgctgagctatccattttaggataaaaggattgcttttgagacttccagatctctgtataatttaagctttctacggcacacaaaccaaatataagcttggcattgacagatgtgtttgaagcagatggaaggcagcttcggtgcagtcagtgttgttcacgaaatgccccgctaggtggcagcagccacagcaggagaaaagagcttactccattacgaccttttctacctgtgtctgaatggtctgctcttgtgttgtacttctttctaaaaattatattttaaaacttcatcatttaaaataccaacagaaaggcaaaaatgggtaacataaactcccttctttataaaattttaccatacttctattagacttccaggtatttttcagagtgacttaaaaatctctatgcctaaggactcacattcagaggcagcaggatctatgtagtcctatttagggccattgaagcaagaagggtttagttgaaacaccaacaaaaattagcagccctgaatgggtctgatttacagttttttatttcctgcgtattgcacaccgattacaagggaggtaaagtcacagtggacgacaaacaaaaaaactacccacgagtctcaactgctttgttttgcatatattacatgtttaaagaaaacacttatgtcaccctgtgtaaggtatggaatgtgtggtgtatttttaaaataatcaagataaatccttaaatatagagaaaagtatagcagatagtagatctttattttcctacattttgccctatttttgtcagaactttttttttttttctagagatgggatgtcgctccctctcctaggctggagtgcagtgtcatgatcttggctcactgcaacctctacttcctgggttcaagtgattctcctgcctcagcctcccaagaagctaggactacaagcatgagctgtcatgttcagttattattagtattattatttgtatttatagtagacatggggtttcaccaagttgaccaggctggtcttgaactcctcacctcaggtgatccacctgcctcggcctcccaaagtgctgtgattacaggcatgagccaccacgcccagaccagaactttttataaaacaaaaaatcttatacatgcaacaattttttgcctccactccaccaaatcattggttctttctcttatcacacactctgaagttgtaatgtaatatccccatttgtgtatatatatatatattttattattattatactttaaattttaaggtaaatgtgcacaacgtgcaggtttgttacatgtgtatacatgtgccatgttggtctgctgcacccattaactcaccatttaacattagataaatttcctaatgctatccctccccacttcccacaacaggccccagtgtgtgatgttccccttcctgtgtccatgtgttctcactgttcaactcccacctatgagtgagaacatgaggcgtttggttttttgtccttgagatagtttgctgagaatcatggtttccagcttcatccatgtccctacaaaggacatgaactcatacttctttatggctgcatagcattccatggcgtatatgtgctacaatttcttaatccagtctatcattgttggacatttgggttggttccaagtctttgctattgtgaatagtgccgctataaacatacgtgtgcatgtgtctttatagcagcatgatttataatcctttgggtatatacccagtaatgggatggctgggtcaaatggtatttccagttctagatccctgaggaatggccacactgacttccacaatggttgaactagtttacagtcccaccaagagtgtgaaagtgttcctatttctccacatcctctccagcacctgttttttcctgacttgttaatgatcgccattctaactggtgtgagatggtatctcattgtggttttgatttgcatttctctgatggccggtgataatgagcattttttcatatgttttttggctgcataaatgtcttcttttgagaagtgtctgttcatatccttcacccacttattgaaggggttgtttttttcttgtaaatttgttagagttcattgtagattctggttattagccctttgtcagatgagtagattgcaaaaattttctcccattctgtaggttgagtgttgactctgatggtagtttcttgtgctgtgcagaagctctttagtttatttagatcccatttgtcaattttggcttttgttgccattgcttttggtgttttagacatgaagtccttgcccatgcctatgtcctgaatggtattgcttaggttttcttctagggtttttatggttttagttctaacatttaagtctttaatccatcttgaattaatttttgtataaggtgtaaggaagggatccagtttcagctttctacatatggctagccagttttcccagcaccatttattaaatagggaatgctttccccattgcttgtttttatcaggtttgtcaaagatcagatagttgtagatatgcagcattatttctgagggctctgttctgttccattggtctctatctctgttttggttactgtagccttgtagtacagtttgaagtcaggtagggtgatgcctccagctttgttcttttggcttaggattgacttggtgattcgggctcttttttggttccatatgaactttaaagtagttttttctaattctgtgaagaaagtcattggtaacttgaaggggatggcattgaatctataaattaccttgggcagtatggccattttcacaatattgattcttcctacctatgagcatggaatgttcttccatttgtttgtatcctcttttatttccttgagcagtggtttgtagttctccctgaagaggtccttcacatcccttgtaagttggattcctaggtattttattctctttgaagcaattgtgaatgggagttcactcatgatttggctctctgtttgtctgttattggcatatgagaatgcttgtgatttttgcacattgattttgtatcctgagactttgctgaagttgcccatcagcttaaggagatttggggctgagacgatggggttttctccatatacaatcacgtcatctgccaacagggacaatttgacttcctcttttcctaattgaatactctttatttcctccagctgcctgattgccctggccagaacttccaacactatgttgaataggactggtgagagagggcatccctctcttgtgccagtttgcaaagggaatgcttccagtttttgcctattcagtatgatattggctgtgggtttgtcatagatagctcttattattttgagatacgtcccatcaataccttatttattgagagtttttagcatgaaaggttgttgaattttgtcaaaggccttttctgcatctattgagataatcatgtggtttttgtctttggttctgtttatatgctggattacatttatcgattttcatttgttgaacaagccatgcatcccagggatgaagcccacttgatcattgtggataagctttttgatgtattgctggatttggtttgccagtattttattgaggatttttgcatcgatgttcatcagggatattggtctaaagttctctttttttgttctttttctgccaggctttggtatgaggatgatgttggcctcataaaacgagggaggattccttctttttctattgattggaatagtttcagaaggaatggtaccagctcctccttgtacctctggtagaattcggctgtgaatccatctggtcctggactttttttggttggtaagctactgattattgcctcaatttcagaccctgttattggtctattcagagattcaacttcttcctggtttagtcttggcaggatgtatgtgtcgaagaatttatccatttcttctagattttctagtttatttgcatagaggtgtttatagtattctctgatggtagtttgtatttctgtgggatgggtggtgatatcccttttatcattttttattgtgtctatttgattcttctctcttttcttctttatttttcttgatagcagtttatcaattttgttgatcttttcaaaaaaccagctcctggattcattgattttttgaagggtttttctcttttttatatagactaattcctataattgtatttcttttattttattttattattatactttaagttttagggtacatgtgcacaacctacaggtttgttgcatatgtatacatgtgccatgctggtgtgctacacccattaactcatcatttaacattaggtatatctcctaatgctatccctccccactccccctaccccacaacagtccccggtgtgtgatgttccccttcctgtgtccgtgtgttctcattgttcaattcccacctatgagggagaacatgcggtatttagttttttgtccttgagatagtttgctgagaatgatggtttccagcttcatccatgtccctacaaagcacatgaactcatcattttttatggctgcatagtattccatggtgtatatgtgccacattttcttaatccagtctatcgttgttggacatttaggttggttccacgtctttgctattgtgaatagtgccgctataaacatacgtgtgcatgtgtctttatagcagcatgatttataatcctttgggtatatacccagtaatgggatggctgggtcaaatggtatttctagttctagatccctgaggaatcgccacactgacttcacaatggttgaactagtttacagtcccaccaacagtgtaaaagtgttcctatttctccatatcctctccagcacctgttttttcctgacttgttaatgatcgccattctaactggtgtgagatggtatctcattgtggttttgatttgcatttctctgatggccggtgatgatgagcattttttcatgtgtcttttggctgcataaatgtcttcttttgagaagtgtctgttcatatcctttgcccactttttgatggggttgtttgtttttttcttgaaaatttgttggagttcattgtagattctggatattagccctttgtcagatgaggaggttgcaataattttctcccattctgtaggttgcctgttcactctgatggtagtttcttttgctgtgcagaagctctttagtttaattagataccatttgtcagttttggcttttgttgccattgcttttggcattttagacatgaagtccttacccatgcctgtgtcctgaatggtattgtttaggttttcttctagggtttttatagtattaggtctaacatttaagtctttaatccatcttgaattaatttttgtgtaaggtgtaaggaagggatccagtttcagctttctacatatggctagccagttttcccagcaccatttattaaatagggaatgctttccccattgcttgtttttgtcaggtttgtcaaagatcagatagttgtagatatgcagcattatttctgagggctctgttctgttccattggtctctatctctgttttggtaccagtaccatgctgttttggttactgtagccttgtagtgtagtatgaagtcaggtagcgtgatgcctccagctttgttcttttggcttaggattgacttggtgatttgggctcttttttggttccatatgaactttaaagtagttttttctaattctgtgaagaaagtcattggtaacttgaaggggatggcattgaatctataagttaccttgggcggtatggccattttcacaatattgattcttcctacctatgagcatggaatgttcttccatttgtttgtatccttttatttccttgagcagtggtttgtagttctccttgaagaggtccttcacatcccttgtaagttggattgctaggtattttgttctctttgaagcaattgtgaatgggagttcactcatgatttggctctctgtttgtctgttattggcgtatgagaatagttgtgatttttgcacattgattttgtatcctgagactttgctgaagttgcttatcagcttaaggagattttgggctgagacaatggggttttctagatatacaatcatgtcatctgccaacagggacaatttgacttcctcttttcctaattgaatactctttatttctttctcgtgcctaattgccctggccggaacttccaacactatattgaataggagtggtgagagagggcatcctggtcttgtgcctgttttcaaagggaatgcttccagtttttcccattcagtatgatattggctgtgggtttgtcatagatagctcttattattttgagatacgtcccatcaacacctaattttttgagagtttttagcatgaagggttgttgaattttgtcaaaggccttttctgcatcttttgagataatcatgtggtttttgtcgttggttctgtttatatgctagattacatttattgattttcgtatgttgaagcagccttgcatcccagggatgaaacccacttgatcattgtggataaactttttgatgtattgctggattccatttgccagtattttattgaggatttttgcatcgatgttcataagggatattggtctaaaattctctttttttgttgtgtctctgtcaggctttgctttcagggtgatgctggccccataaaataagttagggaggattcccatctttttcttttgattggaataattgaataaggattggtagcagctcctttttgtacctctggcagaattggactgtgaatccatctggtcctcgactttttttggttggtaagctattgattattgcctcaatttcagaccctgttattggtctattcagagattcaacttcttcctggtttagtcttgggaggatgtatgtgtcgaggaatttatccattttttctagatattctagtttatttgcatagaggtgtttatagtattctctgatggtagtttgtgtttctgtgggatcggtggtgatattacctttatcattttttattatgtctatttgattcttctctcttttcttctttatttgtcttgctagtggtttatcagttttgttgatctgtccaaaaagtcagctcctggattcattgacttttttaagggttttttgcgtctctatttccttcagttctgctccgatcttagttatttcttgccttctgctagcttttgaatgtgtttgttcttgcttttctagttcttttaattgtgatgttagggtgtcaattttagatctttcctgctttctcttgtgggcatttagtgctataaattttcctctacacactgctttgaatgtgtcccagagattctggtatgttgtgtctttgttctcgttggtttcaaagaacatctttatttctgccttcatttcattatttactcagtagtcattcaggagcaggttgttcagtttccatatagttgagcagtgttgaatgagtttctttatcttgagttctagtttgattgcactgtggtctgagagacagtttgttgtaatttctgttcctttacatttgctgaggagtgctttacttccaactatgtggtcagttttggagtaggtgtggtgtggtgctgaaaagaatgtatattttgttgatttggggtggagagttctgtagatgtctattaggtccgcttggtgcagagctgagttcaattcctgggtatccttgttaactttctgtctcgttgatctgtctaatgttgacagtggggtgttaaagtctcccattattattgtgtgggtgtctgagtctctttgtaggtgtctaaggacttgcttcaagaatctgcgtgctcctgtattgggtacatatatatttaggagagctagcttttcttgttgaattgatccctttaccattatgtaatggccttctttgtctcttttgatctttgttggtttaaagtctgttttatcagagactaggatggcaacccctgccttttttgttttccatttgcttggtagatcttcctccatccttttattttgagcctatgtgtgtctctgcaagttagatgggtttcctgaatagagcacactgatgggtcttgactttttatgcaatttgccagtctctgtcttttaattggagcatttagcccatttacatttaaggttaatattgttatgtgtgaatttgatcctgtcattatgatgttagctggttattttgctcgttagttgatgcagtttcttcctagtctcgatggtctttacattttggcatgattttgcagtggctggtaccggttgttcctttccatgtttagtgcttccttcaggaggtcttttagggcaggcctggtggtgacaaaatctctcagcatttgcttgtgtgtaaagtattttatttctccttcacttatgaagcttagtttggctggatatgaaattctgggttgaaaattctttcttttaagaatgttgaatattgcccccactctcttctggcttgtagagtttttgccgagagatccgctgttggtctgatgggcttccttttgtgggtaaccggacctttctctctggctgcctttaacattttttccttcatttcaactttggtgaatctgacaattatgtgtctttgagttgctcttctcgaggagtatctttgtggcgttctctggatttcctgaatttgaatgttggcctgccttgctagattggggaatttctcctggttaatatcctgcagagtgttttccaacttggttccattctccctgtcacttttaggtacaccaatcagacgtagattcggtcttttcacatagtcccatatttcttggaggctttgtttgtttctttttattctttttttctctaaacttctcttcttgcttcatttcattcatttcatcttccatcactgataccttgtcttcctgttgattgtattggctactgaggcttgtgcatttgtcacgtagtcctcgtgccttggttttcagctacatcaggtcctttaaggacttctgtgcattggttattctagttagccattcgtttaattttttttacaaggtttttaacttctttgccatgggttcaaacttcctcctgtagctcagagtagtttgatcatctgaagccttcttctctcaacttgtcaaagtcattctccatccagctttgttccattgctggtgaggagctgtgttcctttggaggaggagaggtgttctgatttttagtttgcagtttttctgctctgttttttccccatctttgtggttttatctacctttggtctttgatgatgatgacgtacagatggggttttggtgtggatgtcctttctgtttgttagttttccttctaacagtcaggaccctcagctgcacatctgttggagtttgctggaggtgcactccggaccctgtttgcctgggtatcagcagcagagactgcagaacagcagatgttggtgaacagcaaatgctgctgtctgatcattcctctggaagttttgtctcagagtaccaggccgtgtgaggtgtctgttggcccctactggggggtgcctcccagttaggctactcaggggtcagggacccccttgaggaggcagtctgtctgttctgagatctcaagctgtgtgctgggagatccactacgctcttcaaagctgtcagacagggacatttaagtctgcagaggtttctgctgccttctgttggtctgtgccctgcctgcagaggtggagtctacagaggcaggcaggcttccttgagctgtggtgggctccacccagttcaagcttctgggccgtttttttagtcattcaagccttggcaatggcgggcgcccctcccccagcctcgctgcagccttgcagtttgatctgactgctgtgctagcaatgagtgaggctccgtgggggtaggaccctctgagtcatgcacgggatataatctcctggtgtgccgtttgctaagaccattggaaaagcaagcccagtattagggtgggagtgacccgattttccaggtgccatctgtcacccctttctttgactaggatagggaattccctgaccccttgcacttcctgggtgagttgatgcctccccctgctttggctcccgcttggtgggctgcacccattgtcctgcacccactttccgacactccccagtgagatgtacccggtaccttagttggaaatggagaaatcgcccgtcttctgcgtcattcatgctgggagctgtagactggagctgttcctatttggccatcttggctccacccatcccatttatatttttagaagcttcatatgtgtgtgtatttgtattcctaaacaatatattgtactactctgtgtgtttaagagtagttacatattaaatattacttgacatgtgtgtgcttgtatcactttcaatttgcttttattttatttatttattttattttatttgagatggagtcttgctttgttgcccaggttggagtgcagtggtgtgatcttggctcactggaagctctgccacccgggttcatgccattctcctgcctcagcctcccgagtagctgggactacaggtgcccaccaccacacatggctaatttttttgtattttttagtagacacggggtttcactgtgttagccaggaaggtctcgatctcctgaccttgtgatccacccgcctcggcctcccaaagtgctgggattagaggtgtgagccactgagcccagcctcaatttgcttttgtactattatgggagagaccgttatactgaaaaaaaggtagaactttgttaatttactttaaaactgtaagtgttttattttcgtagttccttactaaaggtcagtttgtttctacattttaattttgacacgtggtaccgcactgtatattccactgtactgatgcaaggatctttctaggccagcatgataaagcagatttgctaactcgctctcccttgggattctaactgctttggtccagggtaatgtatgtattgcccttgttttattatatctttaggaatacctgattaccgtcagactaagagttctacatatatatagaaaatttgatggttgtggaatggtgtcttgtttaaattactttccctgatcactcataaagttgatcatcattttgcatctataagacgttccctttttgatttagttcaataattcaacatttactcggcaccaagagtgtactgagtgcacctcgaggaactttgcatacatctgccaagttgagtcctgccttcgtggagttcgtgttgtacagggaagagataggcaaaccacagcatccacaataatacagggaagagacaggcagtccacagcacccataacaaatgagtgaagaatatggaatgttagtaggtggtaaatgcaattgaagaaataaaaaagtagacaggaaaagaatcactgggatactaattcttaggggaggaaggggaagcctgaagtattaaatggggtggttaggctaagccatcttggcagaggcagattttggtgcagccttgaaggagttaagggtgtttgtcgcatcctgtgagacgtaagaattcagccaagcagaagccccacgtaaggggcataccgtccgcatttgaggacagccaggagccagtgcagcaagaacagaggaagggggactgggaaggaagagctgagagcagagaagaatgggggttgtgaattggatggtgggagagaggtgcctacgcacagagggctttgtaggctgttttaaggatgatacaccgatgcgggattttaaggatgatataccaaggcaggagtcctcaccaacaatttaaagaactggccgtgcttgcttgctctgttgacaacatgccatggagggaaaatgacactctgtcaacgttttgagtaatccaagaaagtggcgtatgtgctgagatgagctgaatatggaggtacccaggcactggtcaggtcctggatacgttttgaagggagagaaaacaggcttggaagaggtgtgcgtgaggtgaggatgtgctggccctgtaggtttgtccctcagaaactggaaaagtggagttgtcatccagtgaactgagaaacggtgcagtatgtttatgggatggggaaaatcagagtttctgtcttggacctgttgagtttaagttgtcaactagacatagatggaggggtatgtaggtagctgttcacgtaagttggagtttcagagagaagtcagagtggagaaaataaacatgtatgtcttcaacaaagaaatagtttataaactataggactggatgaaatcttcgaagttcttaggtggagaatagaagaggactatggattctgaagtacctggtcacatatgtttgccattaagcagaaagcatcctagagctggaaataattctaataaaaaatgtgcaggactttcacccagaaaactgcaaaacatcattgagacaaatcatacaaaagctaaataaatggagaggtatacaatatcaaggaccagaaagttcagtattataaaagatgtcagttttccccagaatgatctattgatgtcatgggatatcaataaaaatccaggcaatttcttttgtaaaaaattaagagtgtttctgaaattcatatggaagtgcagaaggccaagaatagtcacagtgatctatatgaagaagaacaaagctagattatgatactgggtatcaagatgtattataaagtaaatcaggaattaagttaggttttgtactagataagcaaatagataaatgaaatggaatacagtttggaaacagatctgcatagatctagttgtctcgttaattactaatttgtactatagtgcaataaagaaataaatcacttcagcaaattgtcaattgaacttaactgtggacaaaaatctgtgacacttcagtctccatactgtacacaaaaatttatccccagtggaatagagatgtaaatgtgaaaggtaaattaagttttgtagaagaaaacctaagataatatttgtatagctttggggagggaggagctagcaatctggacacaaaatcactaaagccaaccttaacaaagtttgtggcatagcatacatttaaatatagtttaaaaatttgctaaccgtaaagaaaaaaaatgagtaaaaattattatgactcattggaattaaaaacctgtgtttatcaaaagaaatcatttcagtataaaaaaatgggcaaaaggcttcaactggcaattagtaaaagaggatattcaaaaggccaataaacatataaaaaagtgtttaccttgatcagtcgtcagggaaatgcaaataaaaaggtaccacacccccagtagaatggctaaaatgaaaaaacaatcaatcccattgttggttagaaagtgaagttcctgaaattctctcatatacaccctctcagggagtgagggtaagaataaccactttggaaaactgatagcacctaatactgtggaaggtaggattcaccattacccagcaattcctggcctcagtgtatacccatggaaaaagcatacatacattcaccaggtaacatgtcaaagcatattaaaagcagcacagtttgcattaactccaaactgcatcagaaccatccaaatgtccatcagcacccagaatggataaataaattatatcaggaaatatctaacggtatcaatgggtgtgaagattgaggaaatgaagtgagacacataattaataaaactgtacaatctctctctctcttttttagacagagtcttgatctgttgaccaggctggagtgcaatggaatgatcgtggctcactgcaacctctgcctcccaggctcaagcaattcttctgcctcagcctcccgagtagctgggattataggcgtgtgccaacacaacttgcttattttttaatttttaatagagacggagtttcaccatgttgatcaggttggtcttgaactcctgatctcaggtaatctgcccgcctcagcctcccaaagtgctaggattacaggcgtaagccatcgtgcccgacaattatcttttacataaaattcaaatttggcaaaactcttctgaagtcttaatagtgattgtcctggagaagagacaatttgaatagagctcaaaggtctatcctgagtccagataattttccctttctttatctgagttctggttacatgggggtgtttcttttgtgaacaagccacatggcagtttttatgctatatgctaatgagaagcttacacagaaaaacaaacatgcaccctggtaccatggagttttgccatcttggaaaatgtctcatgactccaacaaaaaatatgatacaacaaaacttaaatgtaggtaagtgtcagtcattttttattcaaatgtaaaattgttaaaagtcaaaatgccagacacaattccactaggtaaaggaagttaaaaaaaatggagtgaagccaggtatggtggctcacgcctgtaatcccagtattttgggaggccgaggtgggtggatcgcctgaggtcaggagttcgagaccagcctggccaatatggggaaaccctgtctctactaaaaatataaaaatcagctgggcatggtggcagacacctgtaatcccagctactcaggaggctcaggcaggagcattgcttgaactctggaggtggaggttgcagtgagccaagatcacgctattgcactccagcctgggggacaagagcaacactttgtctcaaaaaaaaaggaatgcaatgtggtatcatcgctaaggaactctgtgatatcagatacaggcacgtgaggaaaagcacacatcctccaacgcacagtgtcccaaggtctggcagataaaagcacgccaccatacagcggacataggtgtaattctgcctcacaaagtgtgggaaggctcttgtccagccaagagaaagcaggaaaggaatccagggaaaggagagaaccggaaatgcaggtgggaggtgaagtgcacagagaagaggaagtcactaaccaaatgtattcacatgtcaaaaaagtcaacataggaaaggtataaacagatataaccaataaaatgtttggaatattttttttctggacagattgttaaggactgaaaagcctttgtccagtttcagagagaatgtagagacgcccaatttctatgtactgctggtggtatatctactccttttagaggcaatttggtaatggctataaaaattgaaatgtgcaaacatagcaaatgcagctctagaaattcatcatgaaaagtgccctggaggtgacacacggggaggatggtagcattacttacaacagtgaaaaaattaaaaacaacctgaatattccaaaagggtgtagtttaaataaattaaggcacattcaggcaatggaatactatccggtaactaaataggatgaggcaaaattacaaatttggatgtaaacatttggccatgtttattaactcaaaataaatgttcagaataacatggcgtaaaaaataattaaataaaaagataaatgaacatatcacattttatgtttgtatttgcatagaaaaaattttaaaaagctatatcaccttttcaagtgtagttttctttggtgtttaagattacagaaaactacatttaggggtttttttttctgcagcactttattattttaaaattaagaaaaataattaaccataaaccatgccaaagagcttatcctgcacataatgagtggacaaaatagtttttgtttttatagcaagctcaggcgagtgaaatgactgactctgctttatagaaagacttgtactaagacatatgaggatgctcacaccctttgacccagcaaacaaatttcctaggcatttattctaaggaattatataaatataagcaaagatttacttacaagactacttgtcacatcattatgtacaacatgaaaaattagaaatggccaggcctggtggctcacgcttctaatcccagtgctttgggaggacgaggcgggcagatcattggaggtcaggagtttgagactagcctggcaacagggcgaaaccccgtgtctactaaaaatacaaaaaaaattagctgggtgtggtggcacatgcatgtaatcccagctactcaggacactgaggcaggagaattgcttgaacccaggaggctgaggttgcagtgagccaggattgcgccaccgcactccagcctggacaacagagtgagactctgtctcaaaaaaaaaaaaaaaaaaaaaaagagaaagaaaaattagaaatggtataaacaagcaacaagagagacaatgtttaatggtacatgtccacaccacacaatatacattgatacgtataagacatttgccattgatgtctataggggaataatacatgatttcttcaattgtttttttttaattttttcaaaatctatatagacattagttttatagacataaacataaatttttaaaataaaacaaaccatattgtttggggtaggagcagtgggtgcaaggcagcgtttgcagggtggtcagtggaaacctggtgagttaggagggtctacccagcgaaggaaccaggtggtgggcagggaggagagtttgggaggcttcagatggggtctaaatgagaaatgaagctcacagaagtgtgggagctagtgaaacttgccctggaggtcttgacatgtggatatgatattaacagagattattagtacagaaggaaggtaactgatgaagagaaatgatgagatcagggaacaacacagaatatttctggatgggataataaaaatgaatttttgctgagccctaagagatgggaagaaactggaggtgagtcaatgaggagaaactcaagacagtgtgtgtaaagagagcaccacagtagcacaggctatgatcagagatcagtcaagctttctttgtcctgaagtcgaaagtatccatgagcagccaaagatacacctggaaagccgcactaagccaaattctagagggtattatggttctgggtaaggagctggtgcttgtcaacgtacagtgagggtatttgagagattggagagaataaaggatggatttgggaaggtcagttgagagaagactaaagtaacaggaaagtcatgggaattcataatggtggataagaagaaaggaaacataaagagatggagaaatgacagggctttgttttcagattctatgcacttttttttcagtgtctcgtctaaagaaatctcatataatttatcaaaagaattccatgagctgtacagtcctattttcattgttttaggtgggaaattattggatattgagggaggagaaataagcaacagcagagcataacactgaagactaaagtctcccgccccttggagggagacagtaacacaaatagggaatgatgacaataatgatgaaataatgatgaaatgtgaggagttgggaacacgtgatgagctctgaggagagatgtcagggaagtttggatcagcttccaccattttatctcttgtgcttttcagatcctgaaataactctagaagtttctttaatgtttttttctggagtcacttcttctggaatatctccatcgttctcatcacagcatctcctcccttacactcctacgtccttcttggctgagtttccctggctgcctatctaaggtctctccgcacagcagtggcaatgttcccacctcagctatttctcctgtaattccatttatgtgtgatttgagtttcacttcccatgatatcacttctcatttcttccctgcatgtctatcttttctgggcaattccttctttgcaattcccgttttttaagacatcaagtgcactgatcactgggagcaaagaagacaacacaactaccctctttgctgtctgagaatgcactgaatagcaggcaccctgtgagcagtcaccagcagatgttgaaagaggagatgtgatctgtcaccagtgatgatgatgtgcctcgttatccatatagtgatgtaggaactgaagagctcagaatttgtccttcatgcactttctcacagtttatgtaccatggcagctgaaatgtgagtggtatggttgggagctggtgttatttaactaatctgtggcaactgaaaatatgagtcagaactttgcaaagtgagtggggttgcaggtttctttcctctgactcaggctctcctacatgtctggtaaggtcacccatgaccagcaactgctcccagagccccaggttaaagggggtctggagtagcagccataggcatagggaaaaactgtagacttctataactcttttacttcatggctgaaattacttaaattgttatttctttgtattgtctatgaaaactaagggaagggtctatagtgatgttgataggaatggagaaattggacatgcttttattcctgagtggcctcatacctttctgtcctgtcaggaaaattctccaacccatggtctatgtacagaggctggacatggagactggggataaatgtatagttttctcttaagtgtatttcctactgggatctggaaggttgatcagaaatggattaatattcctagatctccagtgcaatttcactctaatctctctaaaagctgatgccactagaaagaaaatccaggtcaggacagccagcagaacaccagggtcgtcaaaccacatgttaccttttctaaaagtctgcataggaatgcttttgacaaccttgatacctttttgatatgcgtccaatgtttttcatactgtgcgagcttattaaaaataattcccttcaactatactaccaaatgcaattttctgctaacaattaggaacagaagtacattcaaagtgagctttccagacaattacactggcagaaaagcaattaaagcttaggaacagtgtacacatatggttatgtaaaacatagcctttaatgttgctagctgaagaagtttataatgctgttacttttgttacataaagcaaagcatggctgtgcccagcaatgaaatatgctggatctcttagagaaatattaccaaataactttcaatggggctaaattttctacaatgtcttgtgattagacttttaattaaatttggctcaggtaactgctctatagcatacatgttaaaattagaaattcttccagacccaagtgccccataataataactattttggggtattgcgccccattataataactattttggggtattcgattacctcaaacaaagaggaatagcactatataagcagaagttgctctgggcctcaatgaaatcaatgtagctctgcaataattggcctaaagtaaaatattgaaaccagccttttcatattttccaagatccggctgtttattcattccttgagagtgaaaaatatttacattaagatatcatagtataaatgcatagtaatgattacatttatattaagatattttaaagagctaaattaatccctgtgttcatatttatatgactgatgtatttctcattttcaagttaacattgtaggtaatacagactatgttaccattgaaataaataagacttagtaaccatgcaagctaatatcaaggctaagaccagacaccattttttctgagtattagtacaattttaagtacatgatatacaattttagtatattatgtacttctaattatggttttgccagatcaccatactaaaaattgcatttatgttattcatgaagagtggttcaatcatcaaaaacattttgggattaagttgattgtcaattgaggaaattaaggataaacatggatggctaccctcttaagctgcttattgggaagaagtttatgctttaaatttaatagatgtatttataaatttgatagtgtgtacctcatattgaaatatacgtatacgaagaaaatttttcaaggtcagttcatgcaataaaaactgcacgtttttattcaaatatttttttatttttctctttttaattttttttattaaaatgttaacaaagtattagattcacctgtaaagagtgaatccatgacttggtttgcatttagagaaagacaatgctcactctaattaattccagtaaattaagccacaaaggaaattttaagaaaaacaaaaatgtgaaattcttctaaaagaagataaattatttttatataaagtcattccattagcatagatgatttctacaacttttcaaaatcaaagccattggaagtggtttttacattactcaaatctagcatttgtgaattcaaagttaaggactaatatttaatttaattaatttatttacttaagactgcagtggtgtgatcatagcttacttcagccttgaccaactgggctcaagacatcctcttgcttcatcccctcaaagaaagtgctgggatgacaggtgtgagccgctatgcctggcctatttatttccatagaaacatgccttcatagattttcatgaggaatatgaaatattaaattctgttactcagctataacttagtgttgtcccaacagatcaataatcatcaaattaatcatttatcttgattaattttaaaatgagttattataaaatagtatgtgctatggttttactgtctccaccaaaactcatgttgaaatttaattgccattgtagccatattgaaagtgggagcccttatgaggtgattaggtcataagggctgggccctcatgaagggattaatgctgttatcatgggagtgggttagctatagtgggagggagcccctgataaaaggttaagcttggccccatttcctctctgtctctagtgtacttccttgctatgtgatgctctcaccatgtggactcatcatctgccaatgccatgcccttggacttcccatcctccagaactgttaagaaactaaacttcttaacttactaagtctgtaatattctttttcttgagacacagtctcactgttgcccaggttggagtacagtggcacgatctcagctcactgcaggctccacctcctgggttcacaccattctcctgcctcagcctcccgagtagctgggactacaggtgcctgccaccacgtgtggctaatttttttgtatttttagtagagaaggggtttcaccatgttagccaggatgatcttgatctcctcacctggtgatttgcctgccttggcctcccaaggtgctgggattacaggcatgagccactgcacccggccccacagtctgtaatattctattgtagcagcagaaacaccatcctaagatgtttgcattctagatatgctttaattgttgttcttgctccttttatgtagggagaacctttctcatgtagggtgtataatatgcattttcctcactccacttcatcccattttatttttgttaagttatagggttgcagtgaagtaagtgtatgatatctatgtgtaatacacattactaagcttgatagggtggcttttctgaataaggacaaaaatcatttgtttataaatatttttcatccttccacatcttctgcctcagtatcctgagtagctgggattacaggtgtgtgccaccatgcccagatgctttttgtatttttagtggtgatggagttttgccatgctggccaggctgatctcgaactactgatcttaagtgatccacccacctcggcctcccaaagtgttaggcatgagccactgtgcccagcctgactttgacctgtaactttttttcagcttcacgtatgtgtaggaggagctgaagcagctgggctgattcatttagtcttttgtgggtataatagcatgatggagtgtagacgcctgggacatgcagattaaggctattggaggtcagagtttctcaaaagcaaattttgtacagaaaattaataacaacaatgaaacagaaaggttaattgaaggaaaaatacattttaaaaaggattggttaggactgtgtgtccacttcattttaaacaagaactaaaaataaaactgattttaaaattaccttttgccttatgtgctatggttttggagacagatttctgagtagatcaccaagagcttactttaaaaatattacagagcttactttaaaaatattactttttgttggtttaaataactcatcatcataactcagaactcactattggaatagaacactttttgtttaaatgttcacatcattttctgaaatttgcaatgattttcttttatatgtgttactttagagtactttcttggtctacctcaaagttactttggtataattgcaaaatgacacacattgctcccatccctgcacacaagtctttttaaaatatgactttgcttctcttcctattaaaagaacagtagagtgtatttcttcatatcttgagtcttgcctagcccatgagacttgctttgacaaagggcaccttagcaagtgtaatgtaagcacaagttggaaatttgttcatcccttgctgctacaaccctcccaccgtgactagcctgctgcaggaacagaagcctggtgtgcaggggctcctgctttcccaaccatcccagctgaggccctcacacctaaggaaggtcatcctggactgctcatccccaggcagtctcacgcagatcagaacagcccaggcaacccacgaagtcatgatgttttttttcagctactaaatttgggggatagtttgttatgcagcagaagctaactgatacactctcattttggctttactatatagaacttaattaatggtttcaaggcaacagcaaagtaagcaagtgagccaacaaaacttttagctacagctttaccttttcttctttagttcagaaactttaaccatggatatttggtgtaccactatctctgctacaagaatagaaggcatatctcttttctcaaatcactgaaaccaaaataaaacaagtacctaatggtctttcctgggtctgcctctataatccaggtgcagtggaggttgttgtcatacggagctggatagccaggggacaatattcgtcctgatgtggctgcatggatctgaccaccacattccgctgtagaagacacagagagatgggaacgttcagcttcaggcatcacatgtttctatttagctacttttcaaaaccaaagccattatgtctgcattatatacatagagaaaaagaatcaccatcatctctctctcctgaccgtttcaatatttcttccaaatcattacctctgtggaaagtctttatcctccatgcaattaaagttgagagcataaagcaataagacactcatgtgataattctaataatatgtgataattctaataataacactgtacctatagtctccataacagaatactagaaaaactgtctttcatagctgaaaacacacactcacagacacgtgcaaatctcagaatacataaaactcacactggaaagtgtgataaaattcctcctcttttccaataaaggaagtcaatgcaacatggtgcaagcaccctaaggcctggcttttgcacaatggtatgactgcttccacactcacctatgcacgaaggtagtggtttgtcccacactctcctgtctccactcaaacaggtcagggtgttgctgccatgcatggcgtaccccgggttgcaactgtacagaactacagtgtcggtaaagtggccttcatcacggatcctatagccgtagttagggatgcccggatcctcacattttaccagatcaaaacctgcaagagagaaaggcaaggaatgaacagaactcaagggtggacatctgccttaaaacagagatgaaacaaacaaggttgctaaatgctccttgaagggtagggagaaaaaaggagattgtgaatttacaaaggggaaaagaaagatgggtctgtactggggctatttgttacccatttgtgatttcttgaagttcggtcatcttatttgttcctccctacttacaagtttttttttttttttttttttgcttttgttgcccaggctggagtgcaatggcgtgatcttgcctcactgcaacctccacctcccaggttcaagtgattctcctgcctcagcctcccaggtagctgggattacaggtgcctgccaccatgtccagctaattttttgtatttttagtagagacggggtttcactatgttggccaggctggtctcgaatacctgacttcaggcaatccaccccctcagcctcccaaagtgctgggattacaggcgtgagccactgcgcccggcccctcaagctcttgttttccggagttccacaacttcatctgtcagtccaagcctccagtctgcaccctggattctctggtgagccccaatgccctctaggacctctaggaacgggatactctgctgcctctttgcccctctgtcacaacctagacctccaaggaagaggggccacctatcggcactgccagggtgctttgcagaatcctgacagccagcacttattccagcccattgtcaagacccgcccaccttcccgacaacttcttccaaactccaagatgtcaacttcatgggaaaagaaaaaaaaactggcgctcctgaattactgccgaccacactcctgatggtgcatggttatgaggctcttgaggaaatccacacaacaacagaaactccagaaatgaatcattataatgacctcatcaaaataagctcttaaactcaaagaaatagatgacagaaatgaagatttagcttctgcagtactgagagctgtatattccttttatgtgaggcaatattttaaggccatctgtgaaagacagtcttacagtaacatatttctattcatatcatgatgcaaattttgacaattgtaaaagggagagctggaaacttgagggaccacatggtctctttccttctatttccaccaaactttgaatgctttcttttctcaaaaagaaattaaattttgaaatgaatttgtgacttctgctacatcctcctgtcaatgtgaagtctgagatgcccttccattgaggaaaatgtattcttaacttcacaatataattttaccctgctgatgtctgactaatcaggattgagatttgcagctttgtataggagaaagaggacatgcttgatcctttgcactcagtgactaagaaaatttccttccataaagtttccttccacaaagagtcagtctttaccaaccatgacattattatttttacgataaccctgatctatttaagagacaccaataattttaattcagatgcctggaattcaagaacagaagagtgtatccatcttggtgcaaaacaaagggatatgctaaatgtccacaaaggggaggtagaaattagggggatggtttcaatcaatcacctccggtttcagggtcattcaaatatttgatgaccttcatctcactgcataatgccaagaagacagggcagaaaggaagacattcaatatcatgtatgacaaaatccatcattattacagattattcagtgctcatttctgttttcgcagagaggaaaaaagaagcagaagtctttactgttgttattgttgtagtgttactgggtttgcgggtttggaagtgacagcatctgaacaagtctttagaaggcagtcctgcccagcattggggatgaccaccagcaaactagaggcagaatgacttgttggaggtgatgattctccctggccacacttggagtccacctccctattaataacaaacaatcttccaaaatcttgcgctatcttgaatttacattaggtatgctgcttatccaatgtcattggaacatacaattggaaataaccattaggcacacaaaatcggggtgtaaaaaacttttgagttcagcatctatccctatgatcagtaccactggaacaggatcctgggaaaacttaaaaatctttttgaggggtgagggccgcccatgctaacagggcatccaggtcctgtccgtgaagaacaaagctgtgaatggcagcggggccaggaaactgtggggttctgcacacagcacccaggaggtatccaccttaacaaaccacacccaatgtgacccgaacttctcgtttttcaaggggcaaaagaaatctggagttttaaaaaaagtttttaaaaagaggtggaatattgcacgtaatgcttctaaactgagctttgaaacacatctgctggggatgatgaaagcctggactaagaagtggtcaagatgcctacacaggctgctcaacttaacaaatgaggttacgtcccaataaacccattaagagtgggaaataccttaagcagaaaattaatgtaatatacctaactaactttccaaatgtcttaaattcacctagcttaccataaatatgcttaggacagttaccttggcctatagttgtggaaaatcatctagcacaaagcctatttattttataagaaattgttgacatgagatagtcctccccactactaataacaaacaacttttttttttggaaatgcagtctgtctgttgcccaggctggaatgcagtggcatgatctcggctcactgcaacctccatctcctgggttccagtgattctcctgcctcagcctcctgaatagctgggactataagtgcgagccatcacacccagctaatttttgtatttttagtagagtcagggtttcaccacgttgtctaggcttgtctcaaactcctgacctcaagtgatttgcttgcctcggtctccgaaagtgctggaattataagcatgagtctaatcagctagagagtcaacactttcttacaaaacaagctttatgctagacgatttgtgctagtattgaatactgtacaggaaatgaaaaacagatggttgcatgggtgcccaaagtatactttctactgaacgtgtattacttttacatcattataaagttgaaaaattgtaagtgaaccatcataagttgtgggctgtgttcattttgacaataaattatgttctgattgtacagaagcgtttatcaatcataagagattttcttcactggagacatgtgtaataacattcattttcctgtgggacttacaaattgtttcagtagtttatagccataagctctacaagtagtttatagctattaatgctttaaacgttatccagaatatgcctctatgttcagaaatcatggcttttaaagacttcaatcaaaaaaggttaacaaagttctaaaatccaaaaataggcttattttaaaattagtttaagaagaaacattttcctctaccctaaaacttgcattaaagctttgttttgtaatgtttctttccactcttctccaaaaaaaacaagcaaagaaaaaagatgtatccattaaaatgtctactaaactttacttgggttgcattttgtacagaaatatgttttattgctttttctatcaatcattcaatatcaaaagtttttctttctgcttaaactacaccttgtcatacagaagaattaagccaagttatttatggcagcgtagttttctctttatatgaccagctgtctcctttttttctgatgccttttcttgtttttgcaaaagatcacttaagaccttgacagcatcattaaatttattatcttgtaaaaagctctataacttaaagcctctaggcttgtgtgatgtctttttataaaatacattcctctttcctgtcagaaagttgaaagtatttggccattctagagatcagttttccaattttcagtagactgaagagagctttgttctctcaaagctcctcgcaggatttgatggttcacacacagttgctgggagaatcataggcctttacaatgggaagtagcattggaatcacagccatcaataccttgaaggactagagaaacatccctagaaatctgaagcttctacttcgtgtcacttgcgccgtgaaccagcttagtcgcctgctagggagaagagtgctgcctccaccgttaaactgtgcccttagagccatagcatgtcagcatctctcaggttctcaaaggcagttagacttcaatctggtgtttcagacactttgacccctaggctgttactttatccacattcgttaggatacagcctagcctgctgtttccctctctgcaaattgcatgaagtacatttcaattgagctttacttgctgtgtgtttaaagactagaatataatcattgtttcctaaaaatgtcaacactgtttttgaatattggtaaaataagttgatgtgtaataggagaattctgaaatgacaacataaaattctatgatgttaattctgcactatttcagaaaagaatgtttccatgttttaagaaatctcagatggattaaagacttaaatgttagacctaaaaccataaaaactctagaagaaaacctaggcaataccattcaggacataggcatgggcaaagacttcatgtctaaaacaccaaaagcaatggcaacaaaacccaaaattgacaaatgggatcggattaaactaacgaggttctgcacagcaaaagaaaccaccatcagagtgaacaggcaacatacagaaagggagaaaatttttgcaatctactcatctgacaaagggctaatatgcacaatctacaatgaactcaaatttacaagaaaaaaacaaccccatcaaaaagtgggtgaaggatgtgaacagacacctctcaaaagatgacatttatgcagccaaaagacacatgaaaaaatgctcatcatcactggccatcagagaaatgcaaatcaaaaccacaataagatactatctcacacgagttagaatggcaagcaatcaatcattaaaaagtcaggaaacaacaggtgctggagaggatgtggagaaataggaacactttcacactgttggtgggactgtaaacgagttcaaccattgtggaagtcagtgtggccattcctcagggatctagaactagaaataccatttgacccagccatcccattactgggtatatactcaaaggattataaatcatgcttctataaggaaacatgcacacgtatgtttatagcggcactattcacaatagcaaagatttggaaccaacccaaatgtccaacaatgatagactggattaagaaaatgtggcacatatacaccatggaatactatgcagccataaaaaatgatgagttcatgtcctttgtagggacatggatgaagctggaaaccatcattctcagcaaactatcacaaggacaaaaaaccaaacacctcatgttctcactcataggtgggaattgaacaatgagaacacatggacacaggaaggggaacatcacacaccggagcctgttgtggggtggggggagtggggagggatagcattaggagatatacctaatgttaaatgactagttaatgggtgcagcacaccaacatggcacatgtatacatatgtaacaaaccctaaaacttaaagtataataaaaaaataaaaaataaatctcaagtttttaaaggatatgtttaattctacaaagatattcttccaaatagagatatttccattttaatgtgaatttaagagacttttgactgatcaattttaagcctgctgaagagtagtaactttaaaaacatacagaaggtatccttttctatcttgaagccactagtctgcaattattcagggcacaaatactggttctgtatttgctttatgctctagaaactttaaaaaagactaaatcacattatttgtgtcaaagcactattaagtattattacaatcaaaacttgaatgtatttagtaattctatttctttgttttctagtgatttcattttaagtcaaagcacagccaaaatactacgaacaaaatgttctaatcaaaacaagctccaaacattcagctgatgaaaattacttctccatatatgttgcatgaattacgcagtcttaatattcttaagaattaaatcctatgtatcttctaacaatattagagttctatgagacttgcttttagctttcaagtattcggattagttcttatcttccaaataaagcacttgtgtttcaagagaaccggctccagacttaatccattttatacattaggctgaacaacgagctcacagtaatgtgagttttttcagcttctatctgagcaactcttgagaaagtagtttcatgctcaggtgagctctgaaaacataactgaagaaaaggaatactggtcatttttgaatctctgatatattttctcatgagcaactgaaaaaagcttgaagtatttacaaaaacatactatctatctgttaattttacctaagacatttcaattgggataatgtacttctttggcaaaaatctctttaagaatgactctcatgtgaaaaaaagggacagtgttttcacaccatttccttcagtgtaaagaactgcattaaaaacttaatattgctttttattaactctatttggattcatctgaataggaagggagtttcaaaggtaattggttaaatttattttttatagttcacttgagaaggaaagttcattaataatgaatttcctgaaatgtgtgattatttcctgaaatgtgtgattgttccatgttttacaatacatctctctttattcaagaatgaaattctaggtgaagtgagtgtgtgtgtgtgtgtgtgtgtgtgatttttaaactatcttttaaattatttatggttttttaagctacagatgctattgttttcaaattgagtcctcttgttagctactattttcatttaattcattcaatttttcccatatattaagtttttgctgacattattttgtaatcctatgagcagccccatggtaagatactccacatttttaaaaaatagcaatagcaaacaggttgttgacaatgtttaaacagaaatgtaaacttctgaacttaaggtaaaacatcaaaaagcctgtaaatgtccagaatgaaaatcagatagccaaattatctattttttggaactgtcttattttttatcaagcaaacttttaataaatcataaagcaagttaatcatacctaagaatttaatgagtcaatcttgaaacattttataattttaaatacattacattaatcccaagtgaatttaatgctggttgtactttgatcttgtgcagagcttccagcaggtcaaatagttaatatcaattctgagacgtctcagtgaaataattcaaattattcactttctcactgatttttttaccactatgcacgtatgttctctgttgaggatatttaaaactcagagtgggggaacttggggcaagaccaggatcaggcacctacatggatgaactgaaataatttcactctaaattcatctttaaatacatccagttggcaaatattgttctaacttgtacaaggtggtaagaacttacaattaggtgctaactatatactgtatgtattgtaacatcaccatgtgccctgtgccccatgaatatgtgtaataattacttgccaataaaaataaaggaaaataatgagctgtaaaaaaaatgttttcaaatctatcaggaacttttttggggcatggtgggaagagtaaaataaaacggctcctatcttcccctgtctaatgaatgacagataggaaataaatacttataaaacaacacgatgaatgctatggtttgcgtgaaggttgagagggacaaaggaaactagtatattggtagctggaggggttcagtgagccttgcgggagagggtttgagcaggtctaggggcctcctggacgccatccactcagagggagaacagtccaggtggaaaaggcttcaaatcgcatggcagttgggaacaccaatttacaggaacatttgtatatgctgatgcttccttttaaacgtgtggcggttgtgatggagacagggattgaagggaagacaggaaaggtcacgggaaagactggaaaggactcggctgcagcaccaaggagtggagaccaactcagcgtgcagtggggggaaggcaacggagaagactgcacaggaaactgacacaagtatattcgtatttcagagagataatcagaagcaatgtgcaatatggacatgggtgagaagaaagaaaggacaagcaggaaaatctgcaaaagtatttatttagtgctggaaaggagcctgtgtcagtggatgtggggaggggatgaggcaagagtgtgtgcgtggatgaagcatgcacaaatactattttgcaaattgagcctgagtgagagtggacacagaagactcagtagatgatagatggggtctgtgatgaagagaggacaccagagaaaaatgcagctcatgggagaggtgagggaggaagaggagaatcatcagcattgttgtcacataatgattctgatcttctcatagcagatcccctgtattaacccagaaaaggaatacatctttcattgataacacctgttatgaaataattaaaaataaacatgctttggatatgttaggagcatgaggagcacagagcgagacaatctcagtccttatggagtttcacagggaaattagacatcctaacaaatagtaatcgcaataattacccaagctataggcatagacagtatgagtcaacattgacactcaatcacacaagtgtggacttgtattctctgttgttctggtgcctgttttctattacgttttctattttttcccaattaagtgtttgttttgttgtactcacttctttgtatagcaaggggtgaatagttaaaaaataaaaagcccagaatgacttaattttgttttgttttgtttaataggaacttctgtgtgattgtgtaaggatggctccttttgtcaggtagaaccagcctacagttatctggttaatactacgtttatttggtatcattacttgatgtgttcacaatatcatgccttgtacacattttaactttaaaatgttataaattttgtgtttagtaaaatttcatgtaaaataaagttgctactgtataagtgaacttttaatgttattttttgagacaaggtcttgctctgtgacccaggctggagtgcagtggcgccatcttggctcactacagccttgacctagcaggctcaagcgatcctcccaccttagcctattgagtagctgggaccacagatgtgggccaccatgcccagctaatatttgtatcttttgtagagacagggtttccccggctgggctcaaaaccctgggttcaagtgatctgcccaccttggcctcccaaaatgttgggattacaagcgtgacctatcacatttggccttctccctgaatttatttttaattatgatttctttcctgatgatgaagctagtaaattatatatagtaccttaggcttgtaatattctatttttatttatgaaatatctttcatagtataacttcttactataatgttttgcttttgttccaattttttaataggtgttaaaatgaaaaaagtaatgaaaaaatagaaaatctctgtagttctctaattgagaacataaatctggagtagcatatcctctggcctaccgcattgattcattaatgcaatcacttagcatatgaagtgcctgctcggcttcagatattttgctagacgccgaagatacaaaattaactgacctcagtccttgctcaccagaaactcatagtctgtgtagataaaagataacatataaaagttaacatattccctattaaaaggatgcccattcattaattcaacacatacttattaagcgcttaatatgcagtatctttcgtgacacaatgctgtgtttcaatgtataagcatggttttgccctttgggactcagagtttaattggaggtattatagcaggtgcatgacgagagtaagaaagcatttgctttttgggtggtggtcacaggagttccctagctggagtgtcacggttccttctgcagggtttctgtggaagccagatccgagcacagggcagcccacacacacagacagccacacaccaagaaataaatgcagctgcttccaaaggagccccctgtgctttccacggggcaggtgggtgactgtaaactaacacaggtcatgcttgatggcaggtgctgctttcagctttacaaataataaaaacatacaaacacacacacatatgtgcatttatacaaagggagacccagaaacacaacaacacagattcagccattcctatggatcactcccttacacagaatggaatttgattatcctcagaacatactgcaaaacaaactggggatgtttatgtgtcttgcatccagataataactgaagaagtaacttccttgctgaaaaggcctagcttttaaaaaaaatctaggaataaatggtcaaaaaaatgaaactcacatatttctgtttttagctccaaaaactactaattgcttaaaaatatcttgactatcccgagcatttgattaactagtgttggttctttaggatttaaccacagggattagaaccactgcagagtcttcatggcaaagtacaaatgaaaatatttgcaatacacaaagaatttggtataattttatgtcagtcaatataagattcaaattaaacataattgaaaacagagtttgatagcttgagtaattaaatattaatatagagccaatatatagaaaaaggtggcaagtaaaagatagttctaccaatatatcccaaataccataattaaaatgtatctaaattatattgaaatataattctatgctttcaaacacttccgcacacattcaacaataacttttaaaaagaaacatgagagtttctgtgaaattgaattatatgattatttttaaagatgggagaattctcagattatttgtttttttttgcctgattgctgaagaaaaactaaattgataaaaatggtaagaaaagtgtcagaagaacattaggaacacgtcagccgggctatttttaaagtaattcttcattagtagtgtaggtttctcagcacataattttaattttcattgtctaaatctcagtaatgcttatatttatatttatttgctcttagatgggaatatcaaattgatgactcattaaaaaaacttttattttaatggagaaatagcagctctggttaatttattgttatcaccttagacttaagtctctaccagtggcttagaaaccaagtgaatagaccgggccccaacttcaggagtgtctggcccagaacctcatcactaccatgaactccagcatagaggggctgccaccagcgcacacagaagacatgctctgtgccacacaattcatcaggcaggtttgtctgtgctgtcccatataatcctgaaaatcacctacaaaataatgacgattataagagtccaactaagcagtggggcccgtggccctggcactagtttggagagggacggaggatgagaagaaatgggagacaactgagttcttcccaaattctgtcccggactcagccctcacacaccctgcccctgcctcgtgcctccttcacatcttagctgtgaagggcactgcttattgcttggctcccccatgctgtagcgatttttacaagaaaaactaaaggatttatgaaaacacgataagctcctcgtacaagtaaaatccatgtaaatataagggattatcaacaatacctgaatttgttgctgctgttatgactcataggctgatactttttttattctacaactaataaatacaaagaaattgtcccaccatatgtaagaattcaacaccttgagcagtggagccaggtggtcaattccagagaagtgacagcctcaactagaccaccgctgcattgggacgcaagagcgcagttcctccttttccatatctcattctttgaaagaatttctgctgagtgggtgactgccatccatcagcctaactgtggcttgcaggtgccagcccatcctctctgggcttattcctgaggcattaataacctaagccacccgcctgcagagcgagggcgcagggtcatcctgcctatggggatacaacgcctgcttgccgcacacttttgcccctgacatgcatattctgcacctcactgaccgtaaagcgttcagtagcaaaatacaaatacaaagcaaaatggagtacgtaaccaacatttttggaaataaaggccgtgagttccatctcttccccaaaaatggcctcgcttttgtatttcccagttcatctgaaagacacgcaactctcaatctcttccacctttgcctcccttctttccactgctcctgtcaacctagccaccgaaggcgtgcaaagccccctgcacccaccatcaggtgggtcgaatcctttgctttctaagcttccagtgcttagtctaagccttcctcactgcacacaagattgctgttgttgctgactaacgggtcgccaagacaccatggtgagtattcaccctggtcccagtcttctaaggatcctgccatctggtgatgccctctgcaccagggctcatgatgctttgtgccgtagtattgtccagatcctccctgccctttaagatcaagctcccttacggctgcagctgtcctaccctaccctgcatattcctcctgaaggctcttcctcctccctgaatttcctgtgaatcccaccacaagtaggcaatgacaggtgctctgcgtgtatctaattcttccaagtttccccatgcaaataccccattacttcgtctagaaatgaacctccctgaacgcacgggtagcccagagaacatgcattgtttactgtatcctctgagtctggcagtgaaagtggaaacagtgaaatgtatgcatattactatatttaactggtgcttattttaattctagacaatgtgtctgtaagtgcttttgattcaaataaagtagtaagcttctagtgatttcaaagtgttataaaaacacaaagttaactgtattttctaaataaaaataagtgagctgattttcaaaatcgtgaaaataaatgtgtttcaaattttaacactttctgatttgtacaaaatttgggaggatttaaaaatagcactcaaccagaaatatgcaattaggggaatttcagaatggattcagtattatttagcaaacctaaaatggaacctacacagtttcataaagtgtttttctgaagagggaattccatcagctttcattacatatcagtgtggaaatgtgtggtgacgtatttacataataaacatttccatggattattttacataatatatgaaagtcagtgcagacatcttcagtgttatgaataccaaatactgttattttggtcataatgagtttgaggatgataaatgaactgacaaatatattcaatacatttcatggccaggaacatgaataacagcacagatttccagcaggagcggaacattttccttcacctcctgatgaatcattttatttttatattttcacttagagccattttattcctttaggtctgttacattttacagtattagttaaatgactgaacattcaaattaataagaacatatataagaatgagcaatttcttagtatttccttcaaatcttgtactaagagcacagataaagaatttcttcttccaaataggcctatttcatatagatcttgttttacgctaaattgccttaagggttctggaagtttccagaagagagagctaatccatgcacatacataactacctatggaactttcttgtcttgttccctcagttggtttcattggccagaatgtataatgcaccaggttccagtaaagtgaccaaagttgtagggacgcccctggtcacctggcctccaggtgtggttgcattatggaggtgtcagacttcatggcagtggagtccacagccagtggggcaaggttgcccatccagggcatatcacgagtacccgtacttaacccgcaaacctcaaacatcaccaaggaggcatttctcctgtccagtctgcttacaaaatcatttccttattcttaacaaaggaaattgatttctggttaacataatggcaaatgcctgacttaggaagtgctgtgattcctagataagtctctgaattgttttttgcttttttttgtttttgtttttgttttcctatggaacttaatgacactgaagccttcctcatcagaacctaaacctcacagtcatggtttattcctttcttcatctcatttacaattcaagtcatcactgtcctataaattatgcagttttaaaaacatctgtcatttatctttccacctctaacattgtgtttttgtctaacattgtcttattagtaggttgtatgatgtccaatgggcaacttctaacttcgtgggcatctataatctatggttcacatcacagcaagattaaaaacctaacacaaatgacaagggacctcaacattcttgcacccttaataaaatcttacctctctctatttttaccttcaataatctacccttccccattttcccaagtcttacctctaaataaaattttatctctatttatttttaccttcaataatctacccttccccattttcccaagtcactaatagtcatcaaagccagaaacgctggtccattctgaacccctctctctctctctcacatactccacacccatgatcttactcacaccatttttagaaggagttaaaagggaaacttgcctaaaaccatcaaaagaaaactttaaacactctccaacagttaaaatactctttgattttttaaaaaaattttatagcatttcagtactaagagttttcaaaaacaacgttgtgtttacagaagaaacacatgacctgggatatgacagatgaagcagcaggtaagtagcagagccaagaggcccacatccaaccccagagacccaggagggaatttccttcaccccacctttcatcattgttaaaataggcccacatccaaccccagagacccaggagggggagtttccttcaccccaccattcatcattgttaaaacagacacacatctaacacccagagacccaggagggggagtttccttcaccccacctttcatcattgttaaaatagacacacatctaaccccagagacccaggagggggagtttccttcaccccacctttcatcattgttaaaatagacacacatctaacccccagagacccaggagggggagtttccttcaccccacctttcatcattgttaaaatagacacacacccaaccccagagacccaggtgggggagtttccttcaccccacctttcatcatggttaaaatagacacacatctaacacccagagactcgggagggggagtttccttcaccccacctttcattgttgttaaaatagacacacacccaaccccagagacccgggagggggagtttccttcaccccacctttcatcgttgttaaaataggccacacctaacccctgagacccaggagggggagtttccttcaccccactagtcgtcactgttaaaatagacacacatctaatccccagggacccaggaaggggcgtttccttccccctacctttggtcactgttaaaataggcccacacctaatcctcagagacccaggagtgggagtttccttccccccaccattcttcactgttaaaatagacacacattcaacccccagagacccaggagggggagtttcttccccccaccattcgtcactgttaaaatagacacacatctaacccccagggacccaggagtgggagtttccttccccccacctttcatcattgttaaaataggcccacaccccaccccagagacccagtagagtgagtttccttcaccccacttttcgtcactgttaaaataggcccacatctaaccccagagacccaggacggggcgtttccttcaccccaccttccatcatttttaaaatatctgacggtgagtgttcaatcttggcatttactattgaatggtgctaattgtatcacttcagatctttgcagatttcaagctcaatattcccaattgccttggtatgttttcatgttcctcggtctagttgcctggcactggaatttaattgacaggattattttcatatcagtgttttctgaaatttttacttggtttaaaagaaaaaaaaaagcatttgttgtagaaatacaaataggcttcaaatgtttttatgtcagaatttgtggagcagagaaaaataacaattttgaatctgaatcgattttagaacattttttcttttaacgacatcattaaaaatgacctacataacaaaaatcaaaatcagcaacagcatgacctgtgaccccttacccagtgttttcttcctgagacggtgtccaggtctccaggctgtttaacttcctacaaatgaaccttgcaaatgcaatgcatccatgactgactaatacaatcacaatcactttttattacccctagagaagaatgggaaaatattctgtcatcgctcctatcataacattttagattttatagcatttgatgataccatctgttggccttcattttatttcacacttaagtcgtaagccttgagttggatcctcataattacattatttatgtcatcctcctctaggtccttttgtctttctccaagtactggtggccaacaacttattcctcaattagttccacttgatgaaagtaaataacaaggtcgcctgggcatgctggctcacgcctgtaatcccagcactttgggaggccgaggcgggcaaatggcctgaggtcaggagtttgagaccagcctgctcagcgtggtgaaaccccgtctctactaaaaatacagaagttagctgggcatggtggcaggcgcctataatcccagctactcgggaagctgaggcaagggaattgcttgaacccgggaggcagaggttgcagtgagccgagactgtaccactgcactccagcctgggcgacagagtgaggctccgtctcaaacaaaaacaaaaacaaaaacaaaacaaaaacccaaaaatgaaagtaaataacaatgtgaatccactatcagatcatcacaaaatataaagaataattcattatgcaaataagaaaaaataattggcaaaactaaaccttgcaggaaattattcaaatcaatggaaaagctggtcctagactgacatgacctctgtaggatttgagggcatgacagcggtcacccgggtgatcacagacccttattaaacaaatctcccattacagccacagaatgcttggcttcttcccacagaatccaagcacagaatggtttcagtgggacgttcgacaacatcatacactgacagttccgtcttcgcgatgatatacatgttggtcagttagcaaggatgataaaacatcatattaaactgtaagagactggaatatatgcccacctctacctctgatttgctttttgacattgagtacatcaattaagcatcatcttgtgtcactgtcttttcttacaatggtcatcgtggtaccttccaccttcctccctttgagaaatggatgaagatttatgtcctgtttttagggtagcctcaccttgaaacagacgaaggtatgaggtgtttcggtttcagagcactaccgtgctacaaagacacatcccaaacttgccctctcctgaatgttgtcacgtttggccccaagtgccttatgttttacagttgttacacatttgttttcaagcttaaaatagacacataaaagtaaaactttctaacgtaaaccaggaattgtatgtttgcattcccagagatggggatgtcttccctccttgtaaaatgcccaccttgtttcataataaatttcctcttaggtactctcaggcagcctgtctccctattgtattggaattgcttagactgcctcatctattgtgatatttccactgaaaatcattctattgaagaatattttataggctttcttttcttatagcagaagtgtaaaaatgccttttcaggattcttacaaggtgtaagtttataaaaatgtatggctatgtcttgatacattgataggaaagttttgctcatgcctgtaatctcggctcttagggaggaagaggtgggaggatagcatgagcccaggagctcaagacctgcctgggcaatagagcaagaccctactctccactaaaaggaaaaaaaaaagacaaaaaataaaaacaagtggaaaggttggcaaggattcaatcacagaaacacgtgcagagtcatcctcctgtctcatcattggcattaacacttgacatctttacaataccatctttttttttttttgaaagagactctctctgtcacccaggctggagtgtgcagtggcaggatctctgctcactgtaagctccgcctcccaggttcacgccattctcctgcctcagcctcccgagtagctgggactacaggcacccaccaccacatctggctaattttttgtagagatggggtttcaccatgttaaccaggatggtctcgatctcgtgaccttgtgatctgcccacctcggcctcccaaagtgctgggattacaggcatgagccacctcgtccggcctacaatactatcttttttatagcacagaaaattctgagtttacaagttaattttcctcttaacatacacatctttttattaacataatatcagtttaatgtctgttagaaatcaacttttctttctccacaactgaatgtcaccatgttgtactcaataagaattcgtaggataattgtttcagtagtgacctgggaatagtaaagtttgaggtagaccactcattttgggggaatagaaccgaagaaatgagcacatacagattacttttagataaggaagtaaagtaactttgttagatttaagtgcttagtttattttttataataaatcagtttatcttttaaacaaattgtgaaataagtaaatgttgtgttttttcctttagctccgggtcctcatttctcttcacctgcatatgccctgtgtccttctgttggtcttccatggatattcactgtgacccggatcctttaattgggtcaccttgaactctgtaaatgaccaatgccctacctagccctagcccagaatgcatctctgtgtataattggggcatctccagcattgccagccaattcgggttccagtttccagaaactaccctgtccgtctaaagcaggtaaagccatccgctttctgagactcacaatgagggcatcctgctgctggtttgtttctgctattgtgattcaatgtcaaaatccaagccacttactttccctaaacctggttcttggatgcatctctaattaaaccgatgcctccttctgtgtctgagcctctaatctgacagtctgcctgtgtcctacattcctgtaagcataggttctgcttcataaatgctttttccacattggcgcttctcactggagctctgcctgcctatatgctgcttaaggcacctctgcttcctctctcaatatcatctgaccctaagtgacttttacagtttatccacctatcagaatttgtgtgacctcatattgggcacccaatgctaaatatctgcacagaataccttacaaaattttgtctgttgctacaccctccaaatacttcaaatattgtgttcagactgtcatatgatcttcggcctaaaatgtattcctgtttttcctggcccacagcaatgatcagtttcaatccaagtcgctccaatgtacatatagtgggctatgtgtctgagggttcagaaaatatcctgttatcatatccacggtcttatcagagttgacaaaaatacacaaaatacgttggcagaggatgaggttcatgtgaaaccgacaagacagtaataaaaaacaaagagaaaaatctggcttttgtcatccaatttataaacaaaaaatgtgaaataaattttaaattaaattggggaattagttatatatgatatcttttaaataaaaggcactaaactcttagtaatatccatgaagagtcttaaggtcattatatcattccttcaaaataagacagcaagtattttattataacgtgcttgggctcaagtctattacatcccagaattccattatcatgtaccaaagggaagtgaagaaagcatcaggaagaacctagggctgaaaaaatttacctaaatatggaggctgctgttggcatggaatggaggtggaagatatgtagttgagggagagagaagatgccagatgttggcatagaatggaggtggaagatatgtaattgaaggagagaggcgatgccatagcactcaagagggcattgaaaaatgaccttgttttaggatattatcaataacagaggaggctgagctaggaaagtggtcattgacagcaaaagtgaaccctataagacacatttccagcaagcaaaggggactctggacagccggacccctaagagcaggcttcatcatgacccatttgcagcgtgacagagcccagttctgcaggagaaaggaatgataagcaggggacagaaaagacccttcaagcagatggagagttcgagatgtgttccacattacaggggagcatatatgatgaacggggaaactgcggcagccacacacagactactgttatctagttaacatcttttccccatgagaatgtgcagcagttcccttcccaaggcctatgcaatcacagacagccgtatttacccttctcatgtaccatgagtgcgtccccttcacaggttggagctcaggctactacaaaggtctgcctgccatcaaaagtaaagccccattaccagaaagagttgcccagccccggggccgcatgggcctgcaggaccagtgctaactgaagagtgtgagcagaggccatgccatcagtctgtgcagggtgatgcattgtgagtgagccttttctgccttctctccttgtctgctaggggctaacttacttgctaggggcacagggcacagtgcctatggcccacagtctctttagaggctcatggaaatgctttgatttccttaaatcagaagaaaaaagtaaatttctgggttaaagaaactgtattaatatacaatcatctattgatagttataggcacacagtcatgagaagaaatgtttgatgttttgtgtggaggaatggactgtataagaagctcaagcccatggcagtcatggtgtggccccatccctgggtgcagctcctcccaggtcaaagcagggtagtgggtagagagccctgcagacagaaatgtcattcaagagatttctccttacattgataaacttcttcaattactatagcattcttcatttcattttcttagaaacaatgaaggaacatatggttaaaaacaacttgcctatactcagaggaacataaactgttctaccataaagacatactcatgcatatgttcgatgcagcagtattcacaatagcaaagacaaagactcaatctaagtgcccatcagcgagagactggataaagaaagtatggtacatatacaccatggaatactacacagccataaaaaggaatgagatcatgtcttttgtgagaacatggatggagctggagggtattatcgttagcaaactaaggcagaaacaggaaaccaaataccgcgtgatctcacttctaagcaggagctaaatggtgtgaactcatgaacacaaagaaggggatgacagaccctggggcctattggagggtggaggatgagaagagggagaggatcagcaaacataactaatgggtactaggcttagtgcctgggtgaccaaataatctgtacaacaaacccccgtgacatgagtttacccaaataacaaacctgcacctgtgccccaaacctaaaacaaaagttacaataataaactaagattaaaaagcaaatactttattttgaattttgttgctctcccatggatataggaatgaattatcagcaggtaggatactatagcaaaactgtttttattttttatttacctcatgaaaatgctaaaatattacttcttaccacgtatgagagatgacatcttaaataaaatatttcaaatataaaagaaaagcaacagtgccgggcgcggtggctcacgcctgtaatcccaggactttgggaggccgaggcgggcggatcaccaggtcaggatatcgagaccacagtgaaaccccatctctactaaaaatacaaaaaattagcctggcgtggtggcgggtgcctgtagtcccagctattcaggaggctgaggcaggagaatggtgtgaacccgggaggtggagcttgcagtgagccgagatcgtgccactgcactccagcctggccgacagaacgagactccgtctcaaaaaaaaaaaaaaagaaaagcaacttccctatttagattctgatttcagactgagggagcaactaacgttgatatctgtggtaaagaatcatgtaaccagaggcactgatcaaaatcccacataatttcagatgtttgctaacagtggccatgagttggtggccatttttatctgatgcggtgaaaacacagaatgcttatgatgtatcagtgggaagctcttgagctttggattatactaacagggtttgaatcctggtgctgccactcactaatgataggaccttaacttatggaaccctcggtttcctgtctttaaactgaaaataacaaaaggatcatcttcaaagggctactttggagataaaatgagacaatgaatgtgaattgcctggcacgtggtcagtgctcattgatatattatccaatatttctcttttaccatggcccccaaagacacagctggcggtttctcttgcgtatgtacctggaatgaacttggtatctgaccttcagggcttcatgccagatctttaaagttaccgtgtgaatgatatattgaatagcagttactcctatttctttatgtgtaaacttgattcatttcaatgtacaacttttctggcctatgtaagagtagagtgtcctgtcctccagagagaaattcagaagatcattgttgacaggtgactgataatagatagctagatagataaaaacagatcatagataaataatgatagataattgcctcgtcaatcagtagatacatatgtaatagatggatatagacagaatgataatagatcatagattatcaatcaatagatgatcaattaattgacagacacatgatagatacgtagggatagatgatagatgatgacaggtatgatacataaatgtaaatgtttgttgagatatctattagatgcacggatattatccaaaactactgcttgatggcatgaaaacaatgacttttccttaaaacgtcatctctaagattaaacattgatgacaattgtatcctgccctcttgctttgcatgtgaataagaccctcttgtaagcttttcctagcagagaagggaaggtggggttgctgagggcttgcccgctcctcacccacctccagacatctctgagtctctccaggtggggcctgaattagctgggaagaggagaggaggggcctggaaggccaaccggagctgcagtgaggctgatgcttagggaagatcgaggcacataataaaactatgcctgtgaccattcagaatgtcaccgctgaaacctgttttatttgcagacaacagattaactactgtaagctgaaatatttcctgaaactttaaaagtacatgtaagcaatgaattgtacattccctttattaaatatatactttatgtcttcaagtgtgtgtgggagtgcgtgcatgtgtgcgtgcgcacacacacacactttattttaaatgaaattatctgagatggaaggaaaacattcctaaataggaaactctgacgggcagatgttgcagggaccctgatgccctcacctcctgctgctccaaccctggatgtatgaatgattcttctccttccttgagtgtgggcacagtctgtgacttgagctgacaactgaacatggcaagtgtgagagcaccagatgccacggaagtgtctgttctgtcgatgctgagtttgtcaagatacggagcctgactcaatccagggaaagcccttgaaagagggtctggcctccatgaggtgagggctccccatggctttggagaagccagcaaggacacgccctgcccagagaagaccacagccacgtggcagggaaatgccagtggcaccaaggagctgggagtctcagtctgaccactgtgacgacctgagttctgctgacagcctgaagaggcccctgacactcagatgagaccacagcccagccaacacctggtcacgtccttgtgagaccctgagagaagacccagccaagccgtgtctgggctcctgacccacggatgctgtgagataagaaacggtgctgtttcaggcccctacacgtgtggtattttgttacagagcaatagaaaactaaggtacacaacactgcctattatttgaaaacactttaaaacactttataaaattatctacaagttaactgtgggaaaaacaaacactgcttattggatattttcccaacgtttttctcagctaggttaacagctatgtaaaaacaaaattttgccgtaagcttttatttacaaatgatatatagatactgcaatttacaaactacacagatactgcaatgccaggagtagatattagagcagcataatatgtttgccataatcttaatctttattgaaataagtaaaaatctgtgagtgtggatttacgtgcaggctgaatatttccttatttttataaccctattctatactttcccctggttcttagcatggttgtgaataatttttaaaactactcactggatgaaaagatgctttgactcaatttcctaaaatataatacaccgtaaaaagcaagaaggcagtgaatgctattctttgaatactataatctcttttactttaaaacagcaatgcttacacatcacaaccaagaatgtctgggaaatctgtgagtgtctttattattgacaaaattagattgtagaaaatgtgcatttgaggactgcccctcagcttgtataggatttccaaaatctagttcttaaaaagaagtaatcaatgatgacatggacccatcgtgatgcccttttatatcttactcatagccagggaggtgaaggcattgaaagaatctatatgagacgcacacagagtgtctactgatgtgtttgggtagagataggtgggagaggatgccagaagaaaatgacatcaaccttttcaaggtatcagtcaatcctataaagaaagcattatctctcttgatcaacgcataatttcagggactccaaatgatggattctgacataccctgctcttcaccttcaggtttgtttccagtaattgattgcattcagcagctgtgtacacttcatgcttgcaatattttctccttgttttcaagcaccaaaatgacaatgcttagtgcttctgtatcggtcctgagagtgtattcctgtccaaagccactctctcatttatagtagtatgtttaatgttgatgtcatttttattttcaaagccactctgtcatttataatagtatatttaatgttgatgtcatttttattgtatcaatgtgttaataaaaccagcatgacagctacataaacccacagctccatgctttaattttcgcatccacaggctacgttgtaatgtcttcagaattagtcgtcaatatcagatcacccaccttcaccttttacttattgtggcaaaaacataaatatggagctgcagtgcaaacggctgcaaatggatgggccattttacagaatggatgccattcttttttatttcacattgaatttgcagagtaagtagagtgggacttcctaggtctctctctaatgttctttaaactgagtatgaccaggcagtctgcagatccacactgcaggtggcagcacagcctgctggggagctgcaatgtgtcaccactgggtgatcccattgcatctgtagcacggctaagagcgtcagctcctagtccaacgagccttctccaaaacacaactcttgtaataatgctcccctgaaaaaagtgagttaattctaggagatgatactgtctcttaaacatttctgatacagctcatggcagagtgagaagtatagctatgactcatgaaaccgagaggagcccaggaccctggaggtgcctgcagtcaatggtggttggacatcctacaccactatgtttctctctccctccctctcatgtcacttgttaggggtattggtgaaccagcctctaatggttccttttgcccataccctctgctctgtgttacgaattcacagttccaacctctcagtcactgtgatgaccgtgccatgaagagcacagtgacaggatcaatttcccctccatcacacacagccagtggtgtgtgtcccaacgacacaaatggtctcacatttcatataagaagaaaggtttggccaggcatggtggctcacgcctgtaatcccatcactttgggaggccaaggcgggtggatcatctgaggtcgggagatcgagaccagcctgaccaacatagagaaactccgtctctactaaaaatacaaaattagccgggtgtggtgttgggtacctgtaatcccagctactagggaggctgagtcaggagaatcgcttgaacctgagaggtggaagtgcaatgagtcgagctcgtgccattgcactccagcctgggtgacagagtgagactccgactcaagaaaataataataataaataaaggttaatggtaacaatggcttctgtgtatggaatgtcacctaagagtagagcagacacagagctggatgttctatacaatgtcactaattctcacaacaaatctgcacagtgctttactattatttgcattttgccagggtggagactgggctcagagaggtgaattcatggatggaagttcaaagagcagaaggtagaaacctgatccaaggcttctctgttctcaaaagtctggccttcctacccagcgcttgtagatttttattttgggctaatttacatgcagaggacgatgagtaatccttaagcctagaaaacatttctcccataggactgtgttgaggttaacgtacaaagtgctttgagtaactgaagttagaaaaaaatccctatccctcctgaaccatggaaccatgggcaggtttctccaaacctctgttccctcatacctaaggcagtagaaaaatagtaactgtggggttttcatcagtattaagttagatcatagcaaggccttcgtgtgtgagttacaatacatgctaatcagtccctttgcaacttggggtattatgagtgtttccaaggcccctgaaccctgagaactgtctccacttcccatcacaaattgtaggcattcctatgccaagagacatgtgtcaccttctatagcctttttcatgacccctgttatacagagtctgaagaaaaacatacttaaattcatatagcacttggatgttttcaaaagccatttcatatgtgttttctacataagttagaaaagtaaactattattgtccctgcttcacagataaaatcaacactgggaaaaagtgtggtggttgggattgaacagagtaaggaactagaggaaagatgctttaccccgctctgattttgtctcactttaccacagagcaaggggcacactgagagcatgtacttcatcacagagccctgtgcccccatccagacagaggacccagagactgttcccgatgtgggcgagagccctgcacacctaacttcctgttttcagaacagattcagagtcccgcccccagctgcatgcatcgctggccctgggctgtgtgtgggcttccaggacaggcacagctcctgtctaattcatatagcacctggcattgaccttaatctgtagcatgtctgagatggtcagatcctagtccaacaagccttctccaaaacacaggtcttgtaataatgctcccctaaaaaaagtcagttagttctaggagactgaccttatgccagttgctatataaattagacaggagctgtgcctgagggtgtgtcctgtgaactgtaactttctggggaggctggagctggggttggccaggccttgctgtccccctgcctcaaaagcacagctgactaatcccctggaaccctgggcatgacaagaagaagactgaaaagggttcagtacatgactctgccacaaaccaacgcaacgactcgccctatccccatcttccgtctccttacttatctcaaagtctagaacctttcaaaagcagaaaatattttgataaacataccaatttggatgaaataaattgcttttattattcatcactttttaattaaacctttttgtatctattcagcaaatatttatgaagcatcccttagaagcaagccagggaaagtcattgttctgcataattacacccgtgcctgactctcagccacaaggtttattctacaaccaaaatttaagcttgcgtttattttgatggcttcaaagatctctttgcggttggcagtcttgcctaaacaatgagataggtgtaaagaatgacagaggatgttctcggtaagcgatggccactctttcatcaatgctatgtctaatgctgatgtacagggaatgcatatccacaaaaccagcgcctggacagagaggtccatggccttaagctcaaccatctcaaaatgattcaaagaccagtcttgcgtctgctgagatcaagtgctccctaggagtttgggcactgatcacacattcacctggaatcggcctaatgggtagagagaaagtcagcctatagggatctgattattttatgagtcattaaacaaaagtattcctttgagtggctctgctacaaacccaaaccgtaagtgtttatgatgtttcttctacctctgttcaaacttctgccaatataccctggccaggaatcactggtgctttgtggaagggaagctcggctaggttttccctaatgagcctcttcaccacgtctgaacagtagacacttctctagcttcctactttggcagatgcttttatttcccaagcgatatcattcatgaaacttaatgccaagcaggcgttgtgggattggaattgtgtccaaaaataaatgcaaatacaaaaggacccccttgaggagtctgtcatccctctgaggtgctaaaaccagccacaagacacaacgtatttgatatctgaatccagttgttgaaccacacgtgtatgcctgtctcatctccatgtccaggtcaccctggcatccacgcctctatgcccagggagtggcttagtcatgcgtgggtgctgggcgtttcttgacaagttgagtcagtgtccacagaacggaaactagcaagtgaatgagggcagtagaccctgaccaagtacataaataaaataatggaaattgtgtaaatcaaaacacagctaagtacaagaaagggatagacagagaattcaggatagtgatgaggggaccaattcaggatcccccaaaaatgaaaattcagcagggatgagaaatctggttgtggggcaggatgaagagaaagaattgtgaatgtccctatttccctgtctttaaattaaacactgttgttgccaagtgcctgggctcagagtcagggcctctcccgtgataccagctatgcagctgattcattttcagggctggccagtgcacttctgcagggtgcatcctgaggactgtaactttccagagaaagggctttatttttttctttttaaaataattggtacaaagttgccatatggaattgtggcagctctatcatgcagatccagctgttcatctccagcctttcttttttttttttttaaatttttatttttatatttttaattaactttaagttttagggtacatgtgcacattgtgcaggttagttacatatgtatacatgtgccatgctggtgcgctgcacccactaactcgtcatctagcattacgtatatctcccgatgctctccctcccccctccccccaccccacaacagtcccctgagtgtgatattccccttcctgtgtccatgtgatctcattgttcaattcccacctatgagtgagaatatgcggtgtttggttgtttgttcttgcgatagtttactgagaatgatgatttccaatttcatccatgtccctacaaaggacatgaactcatcattttttatggctgcatagtattccatggtgtatatgtgccacattttcttgatccagcctttcagtgtttctttggaatgtcgtttatacccatctgtaattcctcatccattttcacaggcccttcacttcaagcctctgtttgcagaacactttaaagatgttcctgactatgggttctcttctctatcaaaaaagtgagacttttaagagccaagggtaggggggttgccttaggaaagctagccagctgtctttcaaaagcattccctgggtgatttggtaggctcagaattctggttccatcggtgtacccaaaatagatttatctcatcagagggccaatgggactttaacatcagaatgccagttccgtaatttgaaataattgacgaagctggtccatgtaccggaaaccctatgtcaatatcaataaattactctcagagggctactctgatatccaatgcttctgttacttcaggtgaaactcttacttcttgcctgatacagctctgtggaccctcagtgtcaccagggaatacaatttgaatgacaatcatccattctaagcttcttatgtcacagatcacacatctgtgtaaggtgcgaagaagtacaaacaagtggacactcattgtccccgatttcacagagctatgggttatggctccattggacatcattatacaccagaagcatattatctggtatgaacatagacaagtctgtaataaaaagcagtgttttctaacgaaggtacacttttaaagttttattttggtctgacttactattcagaaaacagtacttgcttaataaatgcctattcagcaacgtatttattccgatttggcccaaagatactctggtttttcttcccaggcaattcctctgcatgtatcaatatcggtcaatatacttgatgcctgccaaatgaggatcaccgaaaatcgttgaaaataagttcatcagcaattctggtattcagttagaaggcctggatttgggttgcaattacaccactccctgtgtgcagcaaattactaaaatatctgaagactcggtttttaattcataaagaagagtagaaggagctatttcccaagacctggaattaccaggattgtaaagttgaaaggtccctaagtgtatgcttttataaatatgaagggataaagaaatattgtttgtacccatttctaaaaatgttagggtttttttttattaagctatatattttactctctgttgacattttctaatctactcatgtatatgcattaattatggatctgaaacatttaaatactaatgtttccttaagtagtgcaattaactatcaagaggcaattacaaaagtcttttgaaaatagctgaaagtgtctttacacagtcttaagcataaataacttgcgtaaaatattttatctaaccggtcatcatttctgagacatctttttggaataaatatttgattcaggtatttgatgaccttggggagctggggatttcttcagcttatttacttatatttacaactaacaatttaatgtgaggttaatactattttgattatatggccatcagcaccaccaattttctattacaaatatatcttcccaccagacagtatgttccagctctaagataatcttgcaaaggagacctgaggagtctccgggttttgcaggtggaacagaaaggtgaaacagggagaacaagaaaattactcctgtcaaattgattataataagagctaagtgccaatcctctccaatatttctttctcctatttatagaacatttgtgctactatgtaatcaaaaatgtctgtagaattggaaagtgcccacaaacagatgaatagattcaagcttttacaaagttactcagtgaagtggaagtgacctcaaaacttcctaaagtgatgctggatgccggggagcaatagagtcacagtatccatgtggggtccaggcagggctgagcctcgcccactgacgcaagccttctgggtgagggagggtggacatcaacatggaacaagccgaccacctatagtttccatacggtcacacggctctggagcacatggaccttcctaactgctacctggacaacagaagaggcttcagaattatggaaacagctcagtatccctacattgattccaagcccctgaaattccagtatgcataaatcttcttctggatactttttgcatcaccatgagaaaatgagaccaagtgtttacaaatgagaaatcattccaactggaaatagtcggaggaacatgggaaacagttactagggttggaaacgtaatgagaaataacacacgagctgagcacaatgtgttttttgtgaagcagccacaggaagggaaaaagtgagcttagtaacatcgcaaattgcagcagtgttgagagtgaggtcccaggagagagggaggatcccaggccaacgttttctgctctttgcccagggagccatagcaggggcaggatttgtaagaaaaagcaacgaaaatgtgttcagtggcaagagaactggaagaacgccgtaggtgtgcatggaacttccccgtaattagacaaaatttaatttacccacaggcttttcaaacagtttttcttctcaagtatctgtgttcctctaagactagtgtaggggcaaggaagcggggatgaagacatccaagtaagaaaacaaaatacattgaacatctcgacagggacgagaagtggaaaaaacaatcacaatagcattcattccatctgcaagcaaaatggttttacaagagctctttgagacatttctgagagggaaatcctggaaggtaaaattctagtaaaaattttataattataggttgatcttgtaacatcaattgttatcagtttattgtgcacaaatattaattcataggctttctatttactcagtcttttcaatggtattatcacaaaggtgaaaaactggtttcctcatgatttcagccacacttattctattttttggccaaagtcttacaattcttcacctgtgattttttcctcctaagagggatttgaggtgattaatcttcgtcttaggctcctggattagctctgggtctgtgggatgattattatcttttgcaggaccttttttgcctatccatcaaataaaggtatccatcactaacatacttttatgctcaaaaacccaaacttttaaatttctaatgtcatggtgttcagtatgatatagtttttacatttatcagatgagtgaaggatttgacaattttatatactttaaacattttaattaattagttaattttaattacttatccacaccaaatagctttttcttttacttcagaactaaaaatgctgaaagtggcagttatcactttgcaaattcctacttttgaaacacagcatctcttttatttccctgttcttttggcttcttcatttacatctttaaaaacatattccacattgatttgttcatacagatgatgggaagcaccgataactgggagctacagcttcaatcctggctccaccaactcttaaaactgttatctctggcaagtattcaaagtattcctcttagttctctcgtctcaaaaattaatggtgaaaagaaaatagtttactacatattatgtagttgttgtgtgtgtgtgtgcttatacatatatatgattaaatgtataaatatatgtgtgtatgtgtgtgtgtgtgtgtcattcaaagtctattacctccggttgtatcaaacatctcttctaaagccttcatatataagcacatgaatttgtatcaatgtatactataccccaatcaatatatttaagcccatcagatctaaaatgttgtaagacgtttccttttcaggtccaactattttgttatttgaattaatatttccaaatagataaatttcaagctactagtaatgtgtccgaatatacaaccagtcaacagagtacagaattaaactgcaatcaaaaacacagtaggcagccagaaaaaaatcaatatttaaaacttaatataagccaagtatcagatatgtcctgacaaaatgaaaaaagaacgtgattaagtcgtatgttacttactggtataggtgagttgaaaaccttggtcggtgtcagatccattggtgttgaactctagccacaggtgattggatgtgctgtttaggatcagccccagaagttcatttttagtgaacgtgcccagtggacgtgaggaactgtcttttccatcatatacctgatgaaaattcacagcatgagtccctctatgccttcactggattcttatgttagcaatggtaataaacaatccaaatcttcaaagatgcagttttaaacaatacttaaaaaggcatatagtttacagaaagataaatgaaggacttagagctaaatcatatttgttctttaaattttatctttaccattaacactggaggcaaaagattccattcttgttcagatcattttatattcattactttaagagctctttctgtgttcatttaaaattaaataaatatttctttacatttccaggtttcattatctacctttttattccttttctcatagttcagttataaaagtaaaaaggatttataatattttagtcttgaatatctcctctgaactctcaactaagtcaaagaacatacccttcctttctattcccttctgtctgaatgcactaaaggacaacaagatgtgccggaatcttgtcacattctgtagtctgcaagcctccggtggctttcatcttgaatttgaaataacagaagtatctcatcatgcaatagtaatacagaagtgtgatgttgcttaaaatgctctgtatgtggcattatcttcccaagcagttgtaaaacgagagtagatgtaataagtatacggaagataaggaagacaaggcttggttttgaccagccgggagagggaaggttcagtcatgggttcccaactagtggggagacaggtcacatggtggggagcagtgggtctgtgtcaccatcataatctgaatgaggatcgggtaaaagtgtttaggacccatgcactttctgccaatgccatgaggctcaggtaacagaaacagcactgactttctagtaggacaaatacctaatgcatgcggggcttaaaacctagatgatgggttgaaaggtgcagcaaatcaccatggcacatgtatacctgggtaacaagcctgcacttcctgcacacgtatcccagagcttaagataaaataaaataaagtaaaataaaaaagtcaatgcagcagtcctcgctcccaataacaacagagcactaggtgggcacggctaatccacctgcctccctcactagcagggggctgtaaaaataaacatttattacacgatattggaaaatgttcagtttgtcttaatagaaaaatggtaccctaactaaataaaattaaacagagtcttagtaggctcttccaatgtgtttgtctattttccccacttctttcctctttatacagattaatttttctttcattgtctttcaatcaatatataaacccagggatgtacacagatatagatactcagaaaaggagaaaatacatttagaaaagataattttgtgggtagttatttcattacaattaaatatgcacatgctagtggggtagaatcagatactctctaatctccttactaaaagactattgacccaggtcattgtgtaaaaaccattatttggtttattccatgtttttattagacgagccggggtctgacatccagagactaaatggttttaattccagaggaatctgggtcaaagagaaaaggtgcaggtctccctaggaaggccttgggctaccccgtataccatggaattgtctgtaattgacagaaatccataaagatggggaaatacgaaagaactagacactcagtgaagcccctgctgggtcctgacacactgtaggttcatccgctctcctgaatcttggcttccccgtgtcctcatgaggacttgaccaagcgcaccgtggatccctgagagattgcaccttgctcccagtggcttcatggttacaaccactaaaaatgaacagctcaaaagctgaatcgtaagattcttcagaacaacaattctgcgttctttatccatgtcatcagcaatcagcactgggtccaaccaccgaaaccccagagaaagtgtatgtcgttgatgaacatggaacactcccctgtcagttctctaaagttaaaatctgggttcaggtttcgcactgatcacaaataaaaacccagataggagtggaagtcagaagacttgatttctgattccaattggatgaggaacaggctacacctgttctgtacaacatttcctagttatattttttcacctataagtagctagattcaaagggttcttttcagttattagagaaagtctttgggattcatatgtttaatacaagcctgtaagtatctgcactacaaaccctcctcagagttcagcatttaatgccatatactcaagggatgttgctgggttagctgatgatcacagattagaagacatcacacagaatgctagcatgacaacattgaaagttctggggaaatctttcccagttttacagaaactataccctgcagatttatttccaaaattaattgcgttttccattctatattcctttcatgacatgcttctgagagctcgatatctcttacatgatttttccacatgaagcaagaaaacatcatgtttatttacgtgtgcagggggtgcgtgtatataaaattttagtctttattattacatcacagtatgtgcgaaggatcaatgtgaacagcattaggcttgaaaattaagataattttactataaacatttttaacagagatattttttagcatatttaacaaaatatatgcctgcaaaatgtgtaggtattttatatgactgacagcttctctgtaattaaatgtgagaagcacgtttttttaaaaacaactttttgttataatcaactttaaacagcatgcaatcacaaatgaacataatttccttccttccattgcaataatatttatccttgtgtattttatgcagtatctctaatcattcacctgcactaaagtatagttaagagttatttaaaactttgccttaaaggcttactgacttctaaatttgaggttattaaaaaattcagttgcgatgtaactatttctttttagattagtaagaatgtgctagtttcctgcctaaaaaccacttcttcatgacagtccctcatactgccagtgtgagatttcaaaagactattaaaatgaaagaacaactagaataaaaccactctactaaattatgacattgaaatacaggcaaacgcggccttaggaggaagtaaggccctttaatctgtaagcttctcctgacctttgcacataacttctaatgaggtcaagtggagcccggcgggggctccattccagccattctgtaaagggaggacacacagtgttttcccttttagttggctttctgcatattctcttagaagtctcatagttcaaagtgagttgacaatactgaatctaaaatgcatcattatgtgcatctacgtagatgtaaattaattgaaaaaccctagaattttaaaaagggaataaaaagagccacgtgttcctttcttgccagaaaccaggcttctgtccaactaaattgctcacctcgctgaaataagcaggtgactggacggatgatttatagcaggggagtccaatattttggcttccctgtgccatgttgaaagaattgtcttgcggcacgcataaaatgcactaacactaaagataactgataagcttaaaaaaatcacagaacatctcataatgttttaaatatgtttacgaatttgtgttgggccacagtcaaagctgtgctgggccgcatgtggcctgtgggccgcgggttggacaagatagtattatagcattagctcttgtttcttgaagcttttccttttcagtgccttgaggctaggttgcccattctccaacccctaggccatggaaggttcccaatttattgaaatacttacaggagaggtgaaaattatatcaggactcttagaagttaagggcatttctagttggagctgggattttgtcaatcaacgcaggacctgggtacccctgccatcaatattgagattctgtcttgtcctggcttggcttctcctcatcagccctgtctgtgatctgaccactgtggctggatttacctccattatcacttcagaacctttccagctttccacagtatgaccacatttaaaaatcaagattaactacagaaagggttggtttggggatcctgcaacttttaataattacaactatgtgctagacacaatgctaggaacatccacttatattattgtattaaatcctcaagacagtccagaaaggtaggtacaattgcattttgttacacataaggaagctgaagatcaaaagtgttaaataactttcataaggtgctggactgataaatgttagatcgaggtttatctacaaagttatttcaaagtccacatacactgctctaagcgaagtgacattacaccttctcaaactcattgtgtaaataaatacaaataaatcatatataaaaatatatgttaatatgtgcatatatctatatgtagaaaaatagatagacaatgtattttttgagaagaaaacttggagtcatcatgttggagaagattctttttacctttagagtatctccttcaaacagctggaagcttcgtgttctaaggtggatgcccttgccggcttctgtttctattttatagatacactcatggttattatcataattggatggaaaatttggagacagtaatgttccttcatttcctttgacacttgctccacattcggctacaataaataggacatgagagaaagaggattcaaaagtggaattactgtttttaacagattaaaaactttaaaatcatgatagcctcctcttctatcaacgtatgtgtgttagtaatatattatttcaaaatagatcagtgatttttttttattgtttgaccaactggaccaaaaaagataccccacctagctcattttgaaaattgtcttattaacagaatgacctctgactatgtggaagcagcatgctatcatacagagagttctagaataaaacagaggtgctccagcaccatggctcactggctgtgtcgtcaggttgtcacagcacctctcccacccacctcattcctgcctcatgaaatgtccccaccagttcccacgctcccattctaccattgtttgtctgcattttccttcattgacatcttatggcatcaactgggacgcattcaaaggggaatctaacgacagaccaaaccactgagttatcttcaggatgtcacatccctgaatgcctcagcattatgtcttataatggaagaacattcaatggcagtaattatctgcttctccctctttcccaatgaaggaagagaaaaattgacttctagatctaaatttgtatcaaacaaaattcctcttatcaaggtaaaagtgaaaatacatacaactctctactttctgtcaacctggagaaagtcacttaacctttcagcacctgtctcacagtgaaagtgaacagtttaggtcaagaatgctttcagctccaaaactctaagtccaatacgatcacagaaaaataaagtggctacatatacgggtgcacacacacacagaggtttgtctgtgccaagagagctccacaggagtctgcgccaacaattttacagactatactatgtgcccagcacaccgatgtaaacatcccacagaatgcctattcttttgaagaataattgtcaggttggaaaccaagcatcagttagatgccaggtatgtactgagagcaggagagaaggatgcacagtattccttttccactgggttgctcaaggtactgcagaattttgcagatgacttctgcatgcccactgccacgatactgattctttcacaccctccttccctctttgacaacgaacacaatcagctacatcactggccatgatatcctaatccacttgccagcaggaagttgctagagatccatgattgccccccagtgatttgtgcacgttgaatctcagaatgcctccatgtggaagggtgtgaggagaaagtcagagaggagaacgcttgacatcctgggttcacttctccctcatcctccttaaataaagacagaaaagcaggctttggatgtggctctcggggtgcaagtgttgaggcggaagtgcaggcaattggtgactcaaagatgccattgggaatttataatcattttaagaaattacagtaattatataactataattatgtatttgtataattataattctgtaaaaatcattttaaaagagaaatttatatgtatatatactcacgagtaggtgtatatatctataatatataaatactttatatagttatagctataaaatagatataagtctaaatataaatatatctataaatagatataaatatacatataaaatatatataatatatctagatataaatatatataattatataaatatatttatatctatatatatatttataatatatatttatatatatttatatattatattatatataatatatattatatgtgtatgtgtgttataatacctataatacctataattacttgtgtatgtgttataatacctataataacttgtgtatgtgtgtgttataatacctataataacctataataacttgtgtatgtgtgtgttataatacctataataacctataataacttgtgtatgtgtgtgttacaatacctataataacctataataacttgtgtatgtgtgtgttataatacctataataacctataacttgtgtatgtgtgtgttataatacctataataacctataataacttgtgtatgtgtgtgttataatacctataataacctataataacttgtgtatgtgtgtgttataatacctataataacctataataacttgtgtatgtgtgtgttataatacctataataaccttcgtgacatgtcaataaaccccatttacagatgaggaaactgaagcatagaatagtttacaaaccaaatgtctttcccaaggtcacacagctagtacagattaattactgatgtgatataaactgtgaagtactcataaagggaatagcacttttaaaaaatatcctaaataacacttacatgtactttaaaattaataattcacactactgttcataattaataataaaactggagtaacacaagtttaaatgttcaagaaaaaagtgtcttcttaaggacttttattctaaataggtcaccgattaattgcagctgatatttgttattacattagcatttaggacattagctatataatcatttctcataatacataaaaaaggtgggacaagaaagaataattgagcatttgtatccatgtgaagaaaaaaaatctaaaccaaaagaaataattttacatgtttttattagcctttggaatctgggattttttttaaaaaaagcagatatataataaatggtagtaactaagttcaagtcctcactatgcaagaataataactgtgcaaaattaaccatcccgttgtaactgatgaccctgtatagacagacaatgctgctgctttgccttttagaaaaaatcaaggcaaaagcaactcaccatccttctagcacttcccaaatctcactttatattcacagcttgaaactaaagtcttctattagtatctgaataagtatctctcataacctgagatgcaattaagatttctcagtgaatatgtaataatagctcatttattcaatatgtagctataactgaatgtgaatatacatgaccaaaacacttaaatgtacaaaggtaggatttcattactctagggtagtgtggcacaggattcaaaagatagtctttcacatggcattttccccaaaagtattaaattgctatgaaagtatacaaacttggccaggcgtggtgacccatgcctgtaatcccagcactttcggaggccgaggcaggcggatcacctgaggtcaggagttgaagaccagcctggccaacatggtgaaatcccgtctctactaaaaatacaaaaattagctaggcgtggtggcacatgcctgtaatcccagctacttcggaggctgcttgaacccaggaagcagaagttacagtgagccgagaccacccaactacatttcagcctgggcgacacagtgtgagactctgtttcaaaaaaaaaaaaaaagaaaagaaaagaaaggaaagtatacaaacttggcttgttaactagaaaaattattttaatacatatacattaaatgatatacgaataattgtatatagaaacaaaaatcaaatatatatttaatatgtattaaatataaatatattaaatgtataatatatattaaatacacatgtataatatacatacaatgtgtactcactatttaatttatattttagtacctatatttttcaaagattttaaagacgattaacatagaatcacatttttaaaaatttaaattatgacttttacatcttttctctgttttcagccgttatttgtgtttgagttaataccatcctactgaacataggacagttttgtttttgctttgtcaccttttttttcggattttatgtggaagtcaataagaaaatatgatattttccatgctgaacatgattagccattgtatcctgagggcctagtgcttcatgagtccacttgacaccgcagccgtgttggcatctccaaaggcctactgagaaacatgggtggggaaggaatgccaggacctgggcacactctcaggtgcaagacaaataggatgtttttatgattttatcaacatgactgaagtggagcatcacatgaaggaactatgggagatgggattgcaaacacagcctgaaccaggttgcagggaatgccctaaaacagttgaattttaaagactttaaacaaaaacacagaaggtatagatgttgtgaagattgacttgtgacacaaattctagaatttcaatagaagagaagtatctttgaaagttcaaataaataatcacaggaaaaataagttgtaataataccatgcctgatggggtacaggaatttatctaattttgtttttggtctatttgtcacttacacagtgcatgttcttattactattacatcattggctgggcgcggtggctcacatctgtaatcctagcagtttgggagcgcgaggcaggcagatcacctgaagtcaggagttcaagaccagcctggccaacatggtgaaaccctatctctattaaaaatacaaacattaacctcgcatggtggtgcatgccggttgtcccacctaattgggaggctgaggccggagacttgcttgaacccaggaggtggaggttgcagtgaaccaagatcgtgccattgcactctactctgggcaacaagaaagaaactctgtctcaaaaaacaaacaaacaaagaaacaaacaaacaaaaaacacgaaaacacatgggggtatataacaaaacaaaaaacacaaaaacacatgggggtatataacaaaactaagcccatgttacagatgagaaaactgaggcacaatgacactaattaacatgctcaagatcacacaggtgtgagagggaaactatgatttgaaccccaggcaatctgttatcagaaggtgcaataattatactacatttgttaatacacaatattggtaattattcctattggcagataggaaataatccatgagggctacttgcttatgactttaataaccttgtgattccaagaggataggaaagtgttgctgctgagggaagcaactttctgaatgggatgggttactattttacaaaatgttctttgaagaaacattggtatacttttggaggcatgtcttctgacttaattccgttttcaaattaaatcagaagaattcttgcggaagcttcttatctccattcctatctgctctctaacactacccctacctttctgaccaagataccaccaaatagctcgcatatcacaaaatgtttccttttccttatttccaaagctgtgcaggtggcctcctagtacacaaaaacagatacaacatgatattcaaatgaaagaatggatgtgtcaaagaaactgcgagagcgctccagaccctggggcagtatcccgtaggacgtaatttaataagacactgacattaagtaaagagcaagtgctcagaaaatcacaagagttaagtgaccaaaatttcaaaaattatttgagcttgatttaaaacattcattgaaaatcaccattagcagaattaaatgtttcattttaaaaaagtttttcaatagtctatttaatactaatttaagatgaatgaacacagtttcttaatacaaatcacttgctgttttataaaaaagctactgaaatgttaactataattgaattgtcacttagatttttgcaattgaatgaaactaattaaaatgaaattaacacagaagaaaggagttaattgatttttcagtcaattcttctgtacaaaggaatctacctgtgaaatttcctgtctcagtctgcttggcctgctgtaacaaagtaccacagacagagtggcctcaacaacagacagacgtggaggctaggaagccccaaatccatagcattaaccaaaatgtctgtataaattaatgcatattcaatattcggcaaggtcattttattggggacattaaataactatttatttaattattttaaaaagtaggtgaaaatatataacctctcaatctgcctattcaatacagttaaattggattcaaattctacagctgaagcaacttgtccacctaaataacctcgagcctatacaatgcctcacatttaacagagatgtttcttaacataatggctggaagtaaaggtgtatggctctggttattaaaatgtagaaattgttgtggggcttttgagggcactgtgaaattgggaaaactattaatatgcagatctctatgttttagaagctttattttaaaagcacagaaatagaaaacagctcaactaagaaacagaaacagaaagtctacctttctcctttaaaccaagttcattgtgttctacgcaacaaataagtaaatcttgcccgtaatagaagtctatattaatcaaaatatgcaattccatatttactcacgaagaatatttaagaatttcacaaaatggtactatttttagcccattcattatcctataaacctttatttttacaatttagtgccgttattggattagcttttaagaagcaacagaaactaacattttagcttagaacgttgtttcaattttttaacccaaaattaaataactacatagaattatatacagtttagtgatatatatatatcactaaactctctctctctctatatatatctatagatacatatatagatacactaaaccctctccctatatatagatatacatatatctatagatatgtctatctatagatctatctatagatatgtctatctatagatatagatatatatagagagacagagaaagagagtttagtgttaaactagatataaattaaactagatataaattaaattaaaatacaggcaagatattttgtttcactatgctgtcggaaataacttgtaatccattcaaaaactgaggataagggtgttgatattttttcgttttttatttcgcccaatgactttctactttgtcaagcaaatagagttaatacagttaatcaataagaggatatatatctcactttcattcattttttaaaaaaatctcttactagatacggatttaaggcttatgctgatgtatacatacagccctttaacaccctgagaaaattttttgttcaaataattctgaaatgatgtcatagatgcaatattaggttatggaattatagcaaacatttatctccatcatatatactctctaactttgctcctgatcttttgaccaaaatgtcacaaaccatcacaaaatattcagtttttgttattattcaaaagctgtgcagatggaattctaaatgtgctaagccaatcacgactgccctggccacaatgactgctcaggaataggcatgggactcaatgtgggccaatgagaggaaacccaggacttgtacataagcgatcttcacatagctgtttccacagaactgcacgatgtggggctacagcactgtatgtgatgatatgagatcaggaagccacccagtgctttacccagactggcaaaactgagagatgctgagacctcaggttcttgttgatgaggttgaacccttgatcaaacctcacctgaagatgtccctaggtatggactttacatcaccttaccaataaactttcattttgacttaagccaatgtgggcaactttttctctaatttgcaagtgaaaaagaagatcctaaacaatacacgtgtaatgcacatgccaacaggtgccagaagagagggtttgagcattgaggttgaatacccaaggaatacatgatactatttctatcatcctaaatgcatcatcaggttgaaaaaaaccctaaaatgaataaacacaaataataaaaaagtttccatctctttcatttcaaagtgacttgatagagagagaaatagttctcagctcagatgctcactagaaattccatttaagtcagacacttattagggaggttaaaacggcacacttttaactcagtcgacatccttaggtgtcacctgcaacctttggtatggatttgcctcttttttgccacaggcaaatcatttttatttctataattttagagaaaggaacatgaagcatggatgaatcaaatttttgagatgaaaagagaaccttgtgaggaaagcaattttcctcttttggatacacagaacttagggatgaggcagaccactgtaaaggagccagcagtctgaggagggagacaaagagatgaagacaacttgaggccgggcactgtggctcacgcctgtaatcccagcactttgggaggccaaggcgggcacatcacatggtcaggagtccgagaccagcctggtcaacatggtgaaaccccgtctttactaaaaatacaaaaattagccgggcgtggtggcatgtgcctgtagtcccagcaactcgggaggatgaggcaggagaattgcttgaacctgggaggcagaggttgcattgagccgagatcgtgccactgcactccagcctgggtgacaagaacaaaactccatctcaaaacaaaacaacaacaacaaaaaaacgtaatggcaaaaaccgcaattacttttgcaccaaccttatagaaagagccctggtgctctgtgggcctgagagggctccatctgtctgcaggaggctgctggctgagcactgggtgcactctggagagccagggaatgagggactctgatccaggacagcgtggagggagagtgattgctctgattagtaggggaagcactgaccaggctctgttacactgggcaaatcgatggggttttcactttggagagagcattctgggagctgcggcccctggggttggtggggtctggggagccagggaaagcatcagggggactgcggggttctggagtgaggtggggctaggagggtggggaggaggagcctgaactgagagctctgcagcggccagaatcctccagagctaggacataagcaggtgtggggaattagagagaaatgaagacagcacccgaatgcaccagaggggctggaggaaaaatcaggaaactgcaggcaaaatgcaaaaggctaaatacaaaaagggcctgtccaaggccctcctgtccagtgcggtggttaaaggctgagttgcaggctccctgggttcgagtcttcctagctctgtgtccttgggcaaagtttgtagagtctttttgtcttaacatttccacatgtaacagggaactgtccatcacagcatttacttcgtagaattgtcatgggactaaacacgttattacatggaaggagcctgaagcagtgcctagtctaccacacactgtttaataaatagtacctattcttccaactctagttactgagttttcatattttagaccacagagtaaaaacctgaatgacaagaaaaacagtgtaaagataatgactctggatgaaatagaataacatttaatgggtcttaatcattataatcagtagactactgactgttacatatctagatgtcaccttgatttcattgagttgggggttttgtccagatttcaaactatctcagtcaggagtctttagactccaaccaattctgggaactcctatgatcacctgcaaaataccgtattttttttcttgagataacagtcaaaatttgccttccattctcaaataaatattataaccacaaacagtaagaaccattattttaggagaaaagcagattgtgaaaatatatagatacatgttttggaaacagacacagatgatttgattcatgtttatttgtttaattttttaataacgaaattctgactgtgtatctctggttcgttaaaatccagaaatatagctttatcatttgagttacataatatccctaagcaaccccaaaaatctgccccaaaggcagaatcaaagagattctgcaccatggtaaaataaaacaagttatgctaaacaagttatgctaagtgaacatgtttgtgttttatatggactgttaaattttatcttcagaccttccccacctgcctccagttcgttaactggtgaaattagtgtggttcgtattctggactccccatggactcagaaggcttggtattaaggagaaccttggttaatctctcatctcccttttttcttcacaatgacattagtcagttttctgtaactttaaagaacaatttgtaagacccagaatatgctgagcaacatggctgggtggcaggaactagacgttgtccgtatagctaactacgagagctctggctgtgtggacaacacaccctatttaagctacaacggcagttacgattctcctttgctaaacttcttagagtggcacagttcccagattgctaataaacgtcaccccactggatcagcaagccaattcctgcatgtgagcctagtacttcatggcaaagtaccgaaataaaaattcctgttactcttcggaattatctcttggattcctccagaacacactgaaaaagtgaattcagcattcagatgcctcttgtgcccacttagcaggagtgtgcaaccatcatcccatcaaaggctgccactgacaacaaaaacaaaattgtcaccatcgttataccaagggacacgtgctgcttttaatcaatgcaattgtcagaggttgtgttattatagcttggcttctatcttccagtttttcttttgctccagattttctctctctccgtatatatatattttttcccttcataaatatgcttgacacatgctttggtttcactcttgttcaatcataaaatttcagagctgaaagggacttactttatagatgagctaattcaagcccagagcagttaggcagctcccctctcccctggttggcagagtggagcccacactttcaccctctccttccttgtcaacaaacccccacccgaccccgaccaccctaggcttcttgcctgggctagaccctgcccccatggatgaatgaaatgaaagcgtgtgaccacctacccacacaccttggcagaggtgcactccacacacggcggcccccacccaggcaggtaagcttggtggcaccttctaaacgatatcccaggaagcaggaaaacgtcagagagtctcccacaccaaagtgaaaaccaattcttcggctgaaggcagggactccaggatcatcacatggctccaggtcatattctgaggcatgcagagacagagtaaatgcatgaggatttgggtaaatacacaaagattaaatagcaagaataaaaagtgctattactaaaaaaaaaaaaaaaaacctacatatatattttccccaaacacttataactgttacgtgcattttttttcttgtactatgaactgtcttatgacaaatgacatgggatttagtatttttttttttttaagaattgacaggtaagaatgagaattactagaggctgggaagggggtgtatggagggaaggataaagtgatgttggtcaatggatacaaggatacagttagaaggaatatgttctaatacttgatagcagagtaaggtgactatagtgagtaataatacagtgtacatttcaaaatagctcaaaggcaagatcggaaatgttcccaacacaaagaaataataaatatttgaggtgatgggattcttaagtatcttgatatgtttgtcacacattctactcatgtatcaaaatatcacatgcaccccataaatgtgtacaattattatgtaactagaagacaagcagacaaatagcatattaaaatgagataattcacttcaaaactgtcagcttgagagtgtggaataattttactgatatttctaattgcttaaattggttactgtatccctcccaaaggtgctttttggtaactaacgcatgaagcataacataaaagcaaaggcacagggctatgtttctggaaatcttatcagagccaattttgcctctagaatatacctcagtgaggaacagtggaattttcctctgtttattttcaatctgtaaaccatgtgagattgaaaagtagtagacaagattttgtactaaaattactataaaccattcaagaaggaagtgctaaatataaattaaaaaataaatgtctgatattttgctgcattttgggagtaagtattcaaaatgtcagcactgatatctcacttctgtgtttgccacgttctttacagccaactccttctgatctccgtagtatgtacgtataattgagctctggctgtcaccagcctcttggtccattatcaagtccatggttttgacagtgggaagtgagaaagtgtgggtaagtgcctatttgtttggtttcctccttcttgctgtttccccagtctgtaatgcccagttttgtcagatagtatcaaacagtcagccagccaactaggaaaatatgcttaggtattggaatggtaagaagagtttcagagagaatcttgaaaggccaactaaaagatgtgcattattgcaaagaattgggacaatgaagatcactcttagtttaccgtggggaagaaacgtttagaaaactatgctaatctttctaaaaaaaattacttctacttttttctaacaccatctttagggttcccctaactcggaattttaggttcattattttcactggacatataaaatccaactgatccttttccccttagtattcctcaaatctgatccttcttttttttttttttagtttagttttcattatctgctgagtttgtcactgagatctcatacctgcacttttataaaaacttttatggaactctgtacctaaacacttccttcatctcacttagcttactggtaaagctctgaggtggatactttctgaattatctttgcgtttagataagcaatctactctggatctgtaaaacattcaaactaacattgataaccttgagatatacttattaatttgacttatgcatagtatgactcagaaagaaaataatatagacaatgtcatttaattgaactcaacaaacattaattgacaacctatcatacgtttactttttagaacatattaaaataaagatgtcacaattcagataatattatcacataccttgctgttatcattctacttctatctaaggatatactgtgtgcactcaattcaagccatacatttcctgtcatttctttaaaaatagttgaaaactccaggcactgtggctcatacctgtaatctcagcactttgggaggcagaggcgggtggatcatgaggtcaggagtttgagaccagactgactaacacggtgaaaccctgtctttactaaaaataaaataaaataaaataaaaaataacaaaaaaattagctgggcatggtggtgcatgcctgtaatcccagctactcgggaggccgaggcagaagaatcgcttgaaccctggaggtggaggttgcagtgagctgagattgcaccactgcattcaagcctgggcaacagagcaagattccatctcaaaaaaaaaaaaaaaaaaaaacaaacaaaaacattcttgccaaacaggagaatattttgatattattatgtgctatacctattatcttatataaagaaacaccatgatcttatggttctttgctttaagtatatttttactatatattgtagtttatacaatatcctctgaaagcaacttagaaggacagaaagcctgaaacaacaccatgaggttagaaggtgtgtgttagttgtaaccatcttgattaggctttctaaggattctcttatattaattatcacttaatcattattatacaaagtatatttgcaaggtgtgcatgttcatctttgtctaacacaagaaaagtgtattgccttcagaattccatcttctcaccaacgcaaagattttgttcttggagtttatcctttttttcccccttcatcaattctcttatttccatcaagataaaaatatgcgttacacggtcaatcttaagaatgagataaacaaccaaaaccaccaacaaaacaaactaacaacaccaatctctggacttcacagtcacccagccaccatatccctactctggttatcattagcacaaatttttcaaagtgttgggtgtaccttccattttcccatcctcccttccaagactgtcttcctctcatctattcaggctttccttcacagccttccactcaaatgatcttaccaaagccactgtgacctccggatgcaaaaaccaatggtcaattcttaggcttcctcttactaagtaggttttaatacagttgaatgctctcttttttctccaaaggctttcctttcttagctccctggatgccactctcctcctaactcactggacccaacttctcatttggctgattcggaacttctgctgccccatgtgttgaaattaattctatgccgatgggtttccagtatttctttttctttaatatgatcctgttatatgaactgaagactcttgtcaatcactcttgaatacatccctcaatatccccaggagaaaaaggtctgtattttcttcccaaacctgctttgcttccagtggttttcacgtaaaacagagcatcctcattcatgcaggtgcaaaatcttgaccccactctgtattttatatgacaccttcacttcctgccaatcaagtcagctctaaccttgcatccttcctgtagtctcagcttccatcttgcatctcttgctgggattattgtgtaacatgttcctgttgagactcacgcattgtctttcaagtaaacattgaaaaagctcagatcatgtcaagctcttcaaatccatccaatggcttcatgcaacatcctgagttaacatccaagttacttatgttatctgccctccataactaacttcacgtccctccactttcccctcggtttcaggggtctggccacagtgcccctctgctttatcctaaacttggtgtcttggtcctcccattgtacctctgtctgctgagagcccacccaaattagctggcctgtccattccctgcttcacaatcaagtctcagcctgtcagagacctgcctaggcaattaaagaatgagcgtactctcctctgtcccaggtactcatgactcaaccacagaagaagaaacagtatcctcatttgaaaagtcatggtaccattgaaggagacaaatacagaaaagtcattatgggaaaggaataattttggtgtaaaaacgtcatggaaacgtttttctcctgtattatatagaagaaaacaaattctgcctagggaaaagaagaaaggctgcatgtcagagacaccctctgacctggacaggaggagttttgcctggtgaaaaatgtagaaaggcttatttatttatttatttatttattatttttttgagaccgagtctcgctgtattgccgaggctggagtgcagtggcgcgatctccgctcactgcaagctccgcttcccgggttcactccattctcctgcctcagtctcctgagtagctgcgaccacaggcgcctgccaccaaggcttttgaatgaagagaaaatcacatatgtaatggcacaaagtggtccaacttttaaccttttgaagagaatgactgagaaatgatgctaattcactagaagttagcactgaagaagtagacacgtcgtagcgagtgggaaagtaagtgtggagtatccagtgcacatagttagcaactagtagcagacaatgttatgtagaatggggattgtgcaggtttatctaagccaactggaatacggggctctttttctacaatattaccgttaacatctgcagaaatactgactaggaaacacaatcaggaaacactgctttaataaggccttctgagaaaggcagaaataaactcgattaacaggaaagaaggcagatataaaagcatatgaataccatttatgataaaccacaaagtctctggatgggtaaatgcctcatttgtataataaagttgctagttatttgtatacttaaaaaaaaaactccatggtatcagtgtcactggcaattgtttgcagcacagtttctaggcaaaaatcctaccaaatgaaattactcctctaacatacctgaagaatttgtttactttaaagtcgactttgaaatccaaagtgttgtcttttgtttttaaaaagactttctgcttgtgtgcaactgtctagatgaaatttatttcttctgcaggctttaggtattattttctactggttatgtttaaatgaattgttctgaatgtttacagactgttaaccactttaaagacccatgaaagagtattttattgttgttggcttgcttgtttgtgcaagtagtttataatgacagtgtcagctgtgtagttacattctgacttttatatggtctgagtgtgttacccaaaatccatgtgctggaaatttgatcccctttttgggagtgtttatgtcatgagggacccaccctcattaatggattaaagccattaaaagggcttcttctcttttaccccatggggatatgggcgattctcccctttctgaccatattaccttctgccatgtgatgtcacagcaagaaggctcaccccagatgccagcaccttgatcttggacttcccagggtccagaattgagaaacaaatttctgttatttataaattatctagtctcaggtatgctgttatggcaagtggcacaaacagactaagacagtagtcgtcaaaagagttactgtcagacctgtggtgagggcaccagaataagaaactgatgcagtaaaatgaatagaatttgcacagacttctgagaaacacctgcagaagtgaactgtaacagacttgcgtcactgccattttctttttttggagaagtctatttaaattcattttgggtcctgatgaaagtaagaactggaggaagtgatattctcatagcaatactaattgagatacaccaggggagaatgcagagagagagggatttaggaattagtgttgggaagatttaagtctttgatatataaagtggcaagtttcatgattactgctgattacaacaaatttccaagaaatcaagtggtctgagccagtcttgaaagcttcacttgagtagtgaaataccaagaaaaatcaacaaagtcagattaagataaatggcaactaggtagaattagagggagtataaagtagttcagagcatcttaaaatccccaagaaatattttccttgaagacactatttgattttacataatgttaatcaacatgcactagttagtaggcaattgtgaagttcttattacagttgactcttgaaaaatgtgggtttgaactacttgaatccatttatacatgaattgttttcaataaatacattgacaattttttggagatttgctacaacttaaaaacacatgcagacgaaccatgtcatcaagacttaccttagaaattagtaaaatgttaggtatatcatgaaagcacaaaatatatgtagatactagtttatttatgtgttaattgactgtaggcttttggtcaacagtaggctattagtagttaagtttttggggcgtcaagagttaccctcaggttttccactgtgtgggggttgacaccccaacccttgtattattgaactacagttgaccttgaataatacaaggattaggggtgtcgatccccgcacagtggaacatcatcttacttatgagtaactcatcttacagtaacatacagcagtagagctgttgtttatataaaagtggggcaagcaaactttctaccaagatcttcagttttggtttgggagataagataaatactcaactattgtgacacataatctcataagtggcatcagaagttattaaggaatttatgagatctcaaaagtagaataaattacatgtgactgtggtacccagggaccaccttatgaaaattacatttgatctgggctatgaggaataaggaaggaaaaccctcttcgtccaaagcatcatatgcacaaatgcaagttaatatgattgttcccatcctttggcagctgtagtgcagcagggccctttctgttggtggagggtgggggcatgctggaaatgaagacactgcagaggttctcagtgtgacctgttcactgagcatcatttgtttatgtgaccaagtttatctctcacatgtttggccagtttttaagtggcggcaattttttcttatctgtagaaaaaattagcatctctgtcatagaactatacaaattaaacaatctaacccatacaaataatttctgctgtaacataaaccttatgcaaatattatctatatattatcattaaaaataaagatgttacctaacttggagtattttttgtcattgcatatgaatatattaaactacaagctcatcctcaactgtgtgtgtccacctgcttctttcatcctagaggtggttgtcaatgcaaatattggcacctaccgtagggtagaaaccaatgcaatcaggtgacaacagacccagaggatgcctcccaataaaggaactttcctcagagatcttgtagagttggtgaagagaatcgagtgagaagggctttgcagaatgtagtgacatctacagatttttcaaagacgagaattcacaaattgtgtaacacaaagtggcattttctggatgccacataactgtacttgcaccctgcttcgtggaggctcagcctcctgcaccccattagttggaatcaagtcacgcatgtacaaacacacacggatgcacacattacacacacacacacacccacacacattctcactaacagaaatggcagtattgttgccagaggagagaaacagcaaacaagaccaacatacctgaaaatgtgatattgaagccctcgtacgaaattgagaagtctgatataaaccgaagctgggcagtgaagtttccaaacaggcctgccttgatcgtatgaggcaacaccgacccggtgagcctggcaacgggctcggaaaaacttccatcctctgtgatcagtaaatagtcgtgggaactctcaagatgaaaggtgtgaaagatcatttgaactcctgagaaatgaagccgggggagagagagagagacagagagagacacacggggcggcgggggcagagagggagcggggcagagagagacagagacatagagatgacagagatggagaggaagagaaaataagaggggaagacagattgcagagagtaatagccacagagagacagagatgataaagagatgagacagagatggagagagatggagaggagagagagaaaaagagagaggttaggagaggtaacaattgctgaaaaattttttctggacttagacacatcaagccttaatcaaaatattaaaatgttatcttgatatgaaaatctagctttgaagtttaagaggaaaattggtggaaagaggacggctttagaaatgaaaaaaagcagaagggataaacaacaaaaataaatacttaagtgcatataagtacagatatgatgtaaatatgaagatatgatgtggacatcaatattgaggaaatatggagattatagatgtagttatatatagatacagatatagatgtacatattggcatagatatgtatatttaagaaaaacaggtgagaatgtttacaatgggtttcatttaaaaattgtcagtagactcttagggacagtatttgtcccagagggacaaaggaccagacaaattttcaatttactctaaacaggtgtcctttagaaaaatcttatttggaggtctgcataaccgaggaaaaacttccttaaaaatgtagttttagatgcccgtaaagcatatgacctcatagtaaccggaactacaaaggcttatttctggattcctatagtgaaattaataaaattaactgtgaacagataacttctaataaaaatgtgtatttttatgattataaaactttgatcactcataatctgtgtcttctttatgcttaatttccttcagggcaagttcttctttcatgtcattcatggcagcatagtgccacacagtacacataataaaatgtagccatttcatattaagtcgggttcaaatctatgtgaaaagacgaagtctacataatacttatgtgatcgaaattccaaatagactcttgtttattttattttttgagatagagtctcgctctatctcctaggctggagtacagtggcgcaatctcagctcactgcaacttccgcctcctgggttcaagccattcccctgactctgcccccagagtagctgcgattacaggcatgcaccacgatgcctggctaattattttgtatttttagtagagacaaggttccaccatattggctagtctggtctggaactcctgacctcaggtgatacacctgtcttggcctcccgaactgctgggattacaagcgtgagtcacttcacctggccccaaatagactcttaaagatgacacgtttagtcacagaaaaaagtttcaggctacaatcctaatcccagtgtttataatctacatttcctgcacaaaatgcaaaatatcctgatcttcactatgcttacctataaaatgaggatagaaatatctattctatgagccatctctggattatgtgaagataaattattcattatgtatgatgatactgggtaaacataaaatacaaggaaagtacaaaaattgtcccagatatatcatgaaattggaagttggacaatcgcttatttccctttatttaatcaatggtcagattttattgaatagatgcctttattccttaccacgatagctatatttcaagcttatgttcacatgcgtatattcaggttatctgataaacagagagcaaaacggggaatggtttttattgtacagttgaaagactattgttcttccaaaatcttattaaataataagttaaaatcttgaactatacatgagaaaagtagttatctcacttgtttacaccgtaatatgtttttgttttgttcccgtttttctgtctcatttattagtctgtatgtttgagacctatgatagattcttacctttcccatgagacacttcaatggtccacgtgcagtttagagagtttggataaaaatctggaaacccaggagaaaggactgttccactcttcccttggatgtagcctccacatagagcttaaaataataaagagagatgattacagcactaaagtttcacaatgattgccagaacaaaatactggttaaatggcatgcaatttgcacaaggattaacaaatttaatgtcatatccaagaaaaaccaagcagaacctgagctttatgttacttgcaaatatcatatgctagttcatatgaagggatcttaaccactacaaaaccttgacaacgtaacacagaataaggcacagcaggagagctggaacctgcattaacaagcctcagaattgcagacatggtacaggtttgcactcctgagagccgctggtcttcttagcagcacttcattgagttcaaatcccctcaacaaaccatgtcatgttcaaacactcacttcagacactcattttggaaaaaaagaagagaaagttttatgtaatcatttcaatgggaaagtggcaacaattaggatgtctgcagaatatgggagcttaagtgctcaactctgatgttagaaagttatgagttcaaatgccagctcagcttctcactagctctgtgatctctggtaagtctctcaatcctttacatttctcccatcttgaaaatagaaattatgataaaatccatctcatggataggtgtttgcaatgattgccattgtagaacacaatttacagtgtgtagtagctactaaatgattaaaatggtacctactgatagatactgatcaaaacgttatctactgagagttgctaacgggaattcaattcttaagatatcaataatttaaccttttgaatagactccatatgccctaattttacagacatcaagaggagaatattgacacgttcccgccaactttcttcttttatttcatatcttaagacctctcaagctatcctatgaatggaagcactgaactgaaaaagaataaaaggaaatggagtcaccagagccggagggtagaggcaggaaaggcaactgccgttcatgctctgcaaacaaacagccatgtgctccgggtcttgctcttctcctggaacctctccacctgcagttgtgaggcctatggatgtcaccagctcagatctcgagaccaggctgcccaccctcactgcagcacctccactgtgatggtgaaggttatgtgccagtgtgactgggctaagggctgcccagatagctggtaagaggccggtcatgtctgtgagggtgctgctaggacagattagaatttgagtcagtggactgagtgaagatttgctttcaccaatgtgaactggcatcattcaatctgctgagggctggaaccgaataaaaaggcagagaaaaggctgggcacggtagctcacacctgtaatcccagcactttgggaggctgaggcaggtggatcacctgaggtcaggagttccagaccagcctggccagcatggcaaaaccccatgtttatcaaaaatataaattattagccaggcatagtggcagaagcctacaattccagctattcagaaggctgaggaaggaaaatcacttaaacccgggatgcggaggttgcagtgagctgagatcacgccattgcactccagcctggggcaacaagagtcaaactccatcaaaaaaaaaaaggcagagtaaagaaaaattttatcttttcttgagctgggacatccatcttctcttgaccctgacttcagagctcctggttcttgaaccatcagacccagaacatacatcttcagctcccctggttcccaggtcttcagtctcagacttaattatgccactggcttttccagatgtctagcttgcagaaggcagatcttgggaccttttggcctcccaaacacatgagccaattcccacaataaatcctggttctgtttctctggagcacactgactaatacatccacttactagttagtaacacgtgcaaagttctctaccgctctgtgcttccatggcctcacatgtaaaatggggcaaaaatcacagctcattcctgcttgctgaagaatgaaataagtgaatacatgtaaggagctcacaatagtgtctcacaagtgaaacatcactcagtgtcacaatttactatgcatttcacaaggttcctttgctttttttttttttaacatgcccacattctgtgcatgtatatatttatacttcttttcttaaactaggtaagatgaactatcatgaagtaaatgatactcagaataacttcttccaattagtatgatcattctgaattatgttttataaaagcctcttccacaaataatattcacaaaagaattagataatctatgaaagatgtgactagcctcatcgtgctcactaaccatccatcttaagggaacaaatcatctcctttaatacgtaaacctcatgggaagcatgatataaaaatcggcaaaagagaaaatttttaaaataatttctagaatattttaagaatttctcatggaatttttgcatctgaagattgcagtgactccacatttcactgtgaaagaagtaacattatacatcccacttgaaattaatgtattcaacaaatcgttattgggcacctgctattgagcaagctctgcccccagcatcagggatgattaataataagagagataaaatatctgcccttctaaagtatgaattccagttggaaaagacaggataaaacctgtaacaacataaaaggcagatgatatacaatattggcagatgacacatgactgtgaagaaaattaagaaaaagggatgggatagtgtgaggcttctgggtggccagcggtgccgtacttaggaagtggtctataaataaggacttgagagagacaaaggaaacagtgaatacctggggaacaatttgggtagagagaaagtggttaggaccagggctcaagctacagtggagctgcagggacagggaacagaaaggacacctctgtgactggggggtccttgtaagggttggaggtttctttcagtgacatgatggggcactggatggccctgcctagaaaacgacacgatctcatgacctacctggggtttagccctgctcctgaggctgtgctgagagaatacacagtggtgaagggaggaaggtggtcaggaccccgaaccagggcattggcagcaagatgggaagacatggtctgaacctgcctgtgtcctgaaggtagagccggtgggactttctcctgaatgggatatgggcattacgataaaaaggaggagctgggggtgattgtgagttcataacctgagtgtgaaataactacaggtgaaggagatctcaggagaaccaggtcatgagtgtaaggcaggcgttcagctttggataccaaagctccaagtctgctgggcttgcctgtagaatggccgacattataacaggttacataggtctggaggccatggaagagggttgagcaagggatagaagggagaccacaactatgtgagaacaccagtggcagtgaatgtagaaataagcttccatagagggaactaatgccagcgcaccgcgtagtgggaagaaaaccagcagaggacggaggagtcccgaattcagaaggtttggattcgtaacttttcactggtctatgattggattggtatgaattgatgcaataatttctcaaatttttatgaagacgatcaccataatgaatgtaaaacattttatgtaaaactgagatatcttatatccaaagctacttgtcagtggtctttatcccaaaatctgcatgttatataaactgataaaattaattcatatccaactatgtttaacagtataaaaacaatcaatctttattttatcctctgtcttcatatcatcaggaaaagttacttgatcatttattggggaaaaatctgggagggaatgtgctctgccctctttttgatgttttccctccataccacacacagaacccggaaatcactgaccagccccgtcatgctgccatcaggagaaagtcagacagaaagttagagataaagctgctctcaggcttgtttagatttatatgggtgcaaacacaacgtagtccaattcagttatcatgaagactttacataaaagtaattctgtccacaaatcctataatatttttcaggagaaggaaatttgatgtatggagaattgaattggtattctcacctaaaattgaagtgaggagatgagagaatgaaatgaaatacctgaattacattttagtgtctatacaggtgagggctgtattcatatgtagacatgtctacattcccttagcagagctacaaatatagctgctcataatttgaattatgttaatctgtttcttcatgcacggtagatccttttctgagtagctgtaaaagacacagtaaaattttactgttgctgtccttaatgctataatttcttgaattttacttttctatttatgtaacccagccaacaccaaggatgcaggtatgttacattagaaatcttttggatggaggactaagatatgcagaaatcattgaagaacaaaagaggagacatacgttgtgatattttcctggctgagttgaagtaaagcatccaactattttttttttttttttttgagatggagacttgcttctttgcccaggctggagtgcagtggtgagatcttggctcactgcaacctctgcctcccgggttcaagcaattctcctccctcagcctcctcaatagctgggattacacacatgtatcaccacagccagctaattttttgtatttttagtagagacggggtttcaccttgttgtcccggctagtctcgaactcctgacctcaagtcatctacctgccccgcctcagcctcccaatgtgctgagattacaggcgtgagccaccatgtccgacccatccacccgtttttcaagttctgtcttttgtcctctacttttatccattcatctatcccatcctgcatttagagttacttattaagaaacatactaatgttttccaaacactcattgatgcttctgggcatagaacaatgaataagacagaaaagtccctgtttttccaaagtttacattctaatggggaaggcaaataacttggttttaaaactccagataacgaggtctgatttattctaagaacaagaatattaagttgctctctaaactcaaaggaggtctagatgattagactatgacggacatgctggtgaatcaacaaagtgatgaatgcacatcctggcaaatgtccactcccaggatggtgagtatggagtaagtgatacaaggtcggaggaaatgcagaagatcagaagcaaccctatggtagcagggtgccccgagacaggctgtctgctgaggtttctctgccaactcattccaggatcctacggcttcctactgatgttcatggcaaagcacacagccctctggggattctttagttatttattgtcttcccaccacccgcaccaccccatcacttccccagaccctgccaaagtcttctaataaatggaagtttgcagagtcagttattgttgcctggaactcagaaattgaattcaacaagtttatggatgggaggagggcggcagttgaagcacgcagacaatttcacaggcaacagtgatctccgtgttagagacggcagtgggaaaaagaggagctggtgatgatacacctgctagctccctggacggtggcattcacctccacggtgcccaactgtaacttgaaacctgacagcttccacatgtacatgttaaacactgacctcgttctccaactgtgttgaacttccaactgcttgccaggtttctcgggatgtcaccttggagtcacctctctctcctaaactcctgtatcctcctagtgacacttctaactactccccactattgctttcttcaactggtgtgtttcaggttatttttgtcttatcaattgcctagcctctgcaagtctgcctcttcctcaaagagatccacctgtgaaagcacagccttgggcctgatctgtttccatcttttctctttttttccatcattttcttgttctcctgaaaccacaaatacagttctatttgaagtcagacttaatgagttactttccacttcaataatattcatagactctccatgccctacagaagtcgctgattttattcatatatttatatgaatacattatatatatttttatgaataaatatgttgttcacatatttatttataatagaaactttccaccaaaaggaatcttgtgcagaaacccccagtaggaaggaggggagtaaattggggcagtccagctgcataggagagattccaatcctgatgaccagcccccatctcaccctcagaaaaaccctggggtcctcacagtgtgatcgctggacactgcagcatgaatctctgcctatggccatagaccagcactcgaggcatttgatcatcatctaccttcagtgattcacacccctcaatcctccagacctctttttttctctttgcacctcagtttataaccatttcttcacgttgaaacatgtccctccctctcaacctccatcttaaagatgtatctccaaaattgcctccaagctttcgatatcccaaattggaactttttttctccaacttctttatcctcatccacttttctgtgtctaataaagcacttacttcattgtgtgatttttaaaaatgtctttccttttgctatgctgatagattttaaacttctgtgtgattgcaaatacagcaggttctcaataaatgcttgtggagagagtaaacagttttcaaaaatacttatttaataaaaaaaattttttgacaatataaaaatattttaataacataattactattgaaatattaagaaataaagagtaaactaattgcctgcaagtatggatgaaaagggtaaccaataatactttttcaaatgccaagaacaacaaatttgtctgaaaacatatttgaattgggaaggaaagcattgattatatctcatggtgacacagacttgtttttaaagctttctattaataaatttttctacagaacatatatcttattcataataaaaaagataattaaaatttacaatgttaaatataaaatattcatatttatcatgttacctcccattctccgtgaaaaatgtgcagttgaactacttgcatgattccaaataaattctttttttgttgttaaaactatctttctttaattaaaaaaaatttcaaagttttctttgcgtttgtctttcacaaaattagaggacaatttatcccaatgttcacttctttaacatttgaatgtgtgaaagagtaatgttaaaaacacactgaactgatgctatgcacccagcacagacactgagtttatcgtgtttcatgttgatatacaatattataattatttttttttcttttctgaaagctatgaatgtttaaaggtttaaatatcctacttatgtaacttttgttgcacgaaaaacccatggggtttaagagattgcttaagatttgaagggtaatgagaacaagccttatggttggatgaaaactatcaaacatgactgactgaaactcccatatcaaactctaacatcacccaaaatttgtagatttagtaatagctctttctttgtggagacagagtcttgctctattgtccaggctgtagtgtagtggtgtgatcttggctctctgcagccttgaccacctgggctcaagtgatccccctgcctcagcgtcctgaaccgctgggactataggcacatgccaatacccccagctaatttttgtgtttttttgtgtggaaatggggttttactgtgttgcccaggctggcctcgaactcctgggcctcagcaatctatctacctcagcctcccaatgtgctaggattacaggcatgagccaccatgcctggcttattaatagatttttaccacaaattctttatactgagaaacatgttccagtgctgcaaattacagtcatgctattgattccttcgaaaggtttaaatctcaaatttacatacatttatatcgacagacaataaagaaacaaaatgaataagctaagtgtacttttattttctatggaaaatgccacccatataactggcatccctatagcatctcaattcctgtactgcaaaacctattggctctttttggtctattcccactccgtttctcctaaatcattttcctattgatccttcactcagtttccattaaacctactttgctaaacctccaggaattcttactgtaccgcacctatcaactcctggtaattctgctcatatcctgggatgcctgttcacatgctggctactttgggaaatcctacccaaaacggaaacaccaggttaagggctgtactttccatgaatgtttcctcagttactaccccctgggagcttaaaatcaaactgaactgactgtattgagtatgtaaaatgtattagtctaagatatattcaatataagttgtaaacacatgttatattatctctctctctctttctatctaactttatggagctgaatattaaaagaattgaggtcagaaaagtcagtgccgtcatggcctggagcaattccagaggaatgctcatcaaggctgagtgtgacctggtcttggaggttgaaaatgatttaaataatgcaacatgtaaggatgaagaagggtattgaatattggatgtgtttgattgttggtaagaagagaggaagacattcaattaataagttttattttctaggtcacctgctgggtagagtagaaaatagtcttggctaaaccaggaagaagtcgaatccctgaatagaccaaaaacaagttctgaaattgaagcagtaattaatagcctaccaactaaaagaagcccaggaccaggtggattcacagtcgaattctcccagaagtacaaagaggagctggtaccattccttctgaaactattccagacaataaaaaagagggactcctccctaactcattttatgagggcagcatcatcctgataccaaaacctggcaaaggcacagcaaaaaaagaaaatttcaggccaatatccctgaagaacaccgatgtgaaaatcctccataaaatgctggcaaaccaattccagcagcacatcaaaaagcctatccaccatgatcaagtcagctttatccctgggatgcaaggctagttccatatatgcaaatcaataaacgtaatccatcacttaaacagaaccaatgacaaaaaccacatgattatctcaagagatgaagaaaaggccttcaataaacttcaacaccccttcatgctaaaaactctcaataaactaggtagtgatggaacatatctcaaaataataagctatttatgacaaacccacagccaatatcatgctgaatgggcaaaagctggaagcattccctttgaaaactggcaaaagacaaggatgccctttctcaccactcctattcaacacagtattggaagttctggccagggtactcaggcaagagaaagaaagaaaacgcattcaaataggaagagatgaagtcaaattgtctctgtttggagatgacatgattgtatatttagaaaaccccattttctcatctcaaaatctccttaagctgataaacaacttcagcaatgtctcaggatacaatatcaatgtgcgaaaagcacaagcattcctatacataaataatagacaaacagagagccaaatcaagaatgaactcccattcacaattgctacaaagagaataaaatgctgaggaatacaacttacaagggatgtgaaggatctcttcaaggagaactacaaaccactgctcaaggaaataagagaggacacaaacaaataaaaaaacattccatgctcatggataggaaaaatgaatattgtgaaaatggcaatactgtccaaagtaatttatagatttattgctatccccatcaagctaccattgactttcttcattgaattagaaaaaactacttaaaatgtcatatggaaccaaaaaagagcccatatagccaaatgaatcctaagccaaaagaacatagttggaggcatcgtgctacctgacttcgaactatactaccaggctacagtaacaaaaacagcaaggtactggtaccaaagcagatatatagaccaatggaacagaacagaggtctctgaaataacaccacatatctacaaccaactgacctttgacaaatgtgataaaaacaagcaatggggaaaggattccgtatttaataaatggtgttgggaaaactggctagccatatgcagaaaactgaaactggaccccttccttacactttatacaaaaattaactcaagatggattaaagacttaaacataagacctaaaaccataaaaaccctagaagaaaacataagcaatacaattcaggacataggcatgggcaaggacttcatgactaaaacaccaaaaagcaatggcaacagaatccaaaatagacaaatgggatataattaaagagcttctgcactgcaaaagaaagtacctcagagtgaacaggcaacctacagaatgggagaaaaattttgcaatctatccatctgacaaagggctaatacccagaatctacaaagaacttgaacaaatttacaacaaaaaacaaccccatcaaaaagtgggtgaaggatatgaacagacacttctctaaagaagacatttatgcagccaacaaacataagaaaaaaagctcatcatcactggtcattagagaaatgcacatcgaaaccacagtgagacacagtctcacaaccgttagaaaggggatcactaaaaagtcaggaaacaacagatgctggagaggctgtggagaaacaggaacacttttacactgttggtgggagtgtaaattagttcaaccattgtggaagacagtgtggtgattcctcaaggatctagaaccagaaataccatttgactcagaaatcccattactgggtatgtacccaaaggattataaatcattctactatgaagacatatacacacatatgtttattgcagccctgttcacaatagcaaggacttggaacaaacccaaatgtccatcaatgataggctggataaagacaatgtggcacatatacatcatggaatactacgcagccataaaaaaggatgagttcatgtcctttgcagggacatggatgaatctggaaaccatcactgtcggtagactaacataggaatacaaaaccaaacaccacatgttctcactcataagagggagctgaacaatgagaacacatggacacaggctggggaaacatcacacactgggtcctgttcggagaatgcagggctaggggaggcatagcattagaagaaatacctaatgtagatgatgggttgttgggtgcagcaaaacaccatggcgtgtgtatacctatgtaacaaacctgcacgatccgcacatgtgtcccagaacttaaagtataatgaaaaaaaaaaaagttttggttagatagtaaaatattttaaaaagtaagttaccaatgctcaaagaagaatttggggatggtacttgaatgcacaggtatgtgagaaggttgttttgagaaaaacctcacttacaatcaaaattatgtatctcaaatgagtcaggcaaagtctcttgcttgggtatatcagttttcattaccagatcaagagcatacgtaattcaatgactgtgctatgatgaacagggtgcgttcacccatcaccttacattcagagtactacaacttttcaatctttacaggtatgactaaaatgactgcaagtaaaacaacttgacaagccccatgtcggtacctgttcaacagatctacccacatgaaaaaaaaaagagagcagcttacacacaccctatgttaaaattctatttttgtctatagtccaaattaacaaaaataaattattaaaaatgcacagtatcatccaagaaagccatatgtgtttgcatggcacataaacattcaagtaaaattattgatacaattaacttattctattgcaaatttagggtaatttaataaaacatcaaacagattcaagttcagttacacatgaagaaaacttgaatattttaagggttatcattcttattgcaaatatttttaatatagaacccaaaaatatgacaaatatttgcatcgtctatatgacatccttgagttttacaaaattataattagccagtagttatcatccttctgacactaaaaattatacagacacatgtagtttatttatttttcattactagagttccaattacaaaaataagactcagtaacataaattcaaataataccaaaaaatgtagagtgaaaaataaaaaatctcactgctcccacgctacagcctagttatctctgaagaggcgagcatgagagttacaattttagaatgtctattttcagtcaatttctatgcaattctgtgtgtacctgcaattacatatatctatacagtatatgcatatacacaacatgcattgttctattacctcttattttttcctttaaaaagaatgtatcaggctgggcgcggtggctcacatctataatcccagcactttgggaggccgaggcaggcagattacctgaggtcaggagttcgagaccagcctggccaacatggcaaaaccctgtctctactaaaaaatacaaaaattagctgggcatggtggtgggagcctgtaatcccggctgctcgggaggctgaggcagggtaatcgcttgaacctgggaggcggaggttttagtgagccgagatcctgtcactgtgctccagcaggaaagggaaaaagttattatttatttgcattcttctgattcctagtcagcactggaatattttttaaagtttattgggttagggttatttatatatatatataaatttatatatgtatatttattattagcattccaataactttagtaattagttatatatatgttattatataatatataacacataatatattatataataacatatataatataatatatataatatattatatataatctatatatttaattagttatgtatataaatttatatatatataaatttatataaatatatatttattattagcattatgtctttctctatatatatctataatagatatataaatatctctatataatatataataataaatataaatataaatatctctctctatatagagatagatataaaatgtatctgcatagctcattttctcatagatctgttggcttattagtgttgcatttcttctctcttccagtagcagagtatgattatttcatgtgtatattacatggagaatgcaactatttttggttgtctgaccctttattttacatctttaatagaataacttttagtgtgcatatagcaaaattgatcaatgttttttcatttactgtttctggatttctttagttttccaagatttaaaaactaagatttctcaaaaaaacccaaaactaaatgacaaagaaaacatgatgctcacaggcatggccacttaaacgctgtgacaaagtcagccgaacaatgagaggagaaacaggatctcaaataccaatgatgccagcgcatgtagatagccagattggagaagaaatggatctggacactacatcgttccttaccacaaatccacaaatttttagatggattgaagttataaatttaaaagataaacataagtttttacttttaggggtgattaacaagttatagatcatggtgatgctttcatagatgttcatatgtatcacaaatcgcatcaaattgttcacattaaacatgcagtttactgcatttcagtcacacctcaataaagctgttaaaatgtttaaagtttttaggagagaacaacagaatgtcttcattactctgaacggagggaagccttcttccacactaggaaaacctcatgcatggagggaagccttcttccacactagaaaaacctcatgcatggagggaagccttcttccacactagaaaaacctcatgcatggagggaagccttcttccacactaggaaaacctcatgcatggagggaagccttcttccacactaggaaaacctcatgcacgaatgaaaacagtgaaatatgggactatcttaaaattaaaaatttctattcatcgaaatgatgccaataagagaaggagaagaacaactccagaataaaagacttacaatgtgtagatcgaaggaactgtatctaaatatttacacaacacctataattcagtaagataaacgcatgtgacccaatagaaatggaagcaaagaaagagatgctttataagagatgatacatcaatgtccaataaatatacaaaaatgtgctcagaacaactgaaatgtcagcaaacagtagaatgaaataaaaacttttgatatgtttaagcaataatattagatgatgagaagcagcgaaacacagctaactgccataatatggatggaccccacagacttaaggttgcaggaaagaagctggacaaacaggaccttccctggataatttcatttatttacataaccactagtgccagacaattaaggttcaaccctgggaggcagtgactgggcgaggctgtgaaagcgaagtgtggagtcctggaaaagttcgtttagtgacctacatggtcttgagctgacagggacatgtttactctgggaaatgcattgagctacacacttatacttgtagaaataaataaatatgtagacatctttaaaaaatggttgtctgagagatagtctaaattttcacataataattttaagttttgaatctttatatcttcaatcaatgtgtaacttatttcatgtacatttttaaacatttttaaatcaaatcaggcatccaatttgagcaacactatgtcttaataggatatcccttttctacaaaatggaataattatattataaattaagtttctgtacagacaaagatctgttactagaatccttacgctattgcactaatatatttgtgtatttccataccaattccacattgttcggtttatcattagtttttcatatgctctgatacaacatgggacagtccttccttattattctcaaaaatatatttcgtatccatttggagcatttcttttccaaattaatttttaaatatttgcaaattgctatttatatattgctatatacatataaattaatatagatgctatttatatataaatatatatttatataaattatatataaatatatttataatatttatatatattatataaatatatatttatataaattatataaatatatatttatataatatatattaatatatgctatttatatataaatatataattaaataaaatagtatacatatttatatatgctatttatatgtaaatatatattatatatgcaaatatataatatatattatatatgcttatatattacatatgctaatataatatataatatatgcatatataatatataatatatatgcatatatagcatatataatacatatgctatttatatataaatatataatatataaatataatatatataatatataaatatataatatataatatataaatatatatataatttatatataaaatatatatataaataaaaatatatataatatataaatatataatacataatatataaatatataatacataatatataaatatatagaagtctaaatatataaatagaaatgtaaaatcatatacatatacatgcatatctatgaatgcatatgtatgtatacatgtgtatgtatgaatatatatgtatgtatgtatataggcctttacatttcttgctagatatattattcctggataatttttttgtgtttttgtgttttaccctacatgtttttattgtatttctaataagttatatcctatgcggaaatctattgacctgttatcctgaatgcagccacctactgaactgattgttgctaaaagtcaactatcttctctttataatatttctaattcatatcattttcatatacttttgcatttgttaggatcttcaaagcaatgttacacaatacttctaaaaccaaggagtatatcctgttcttgactttcaagggaattttataagagtttactattaattatggtgttttctgtaggcaaattcacttatatgacggttctctgtatatttatgaaagcgatatattattttagagtttatgtttaaatatttattttagagtttacttaaagtttaatgtaaaaaaatgagacatgtctttccagaaaaacttaggcataactactgttcacaggttttcacctctttcatctgcttggataagaagaagttggccagagaattcctctgtgggaaaatgccagggctgggtatgcatagtccatgttgcagattcacatatgagaggaaaaaaaaagcactaggtaatttctgccaccatctgtgattgtcgtgaaatagaagaggaattaagaatgtacattttagcaattgtctaaattcttactgtctttcctgctgcaatagtaattcttagctcatttaagattggtaagtggcaaaatgatatcaatacaatgtctaaattaccttggtgcttacaccatattccctagacaaatggagttgatgtattagaattataaccaatagcaggaaaagaaaaatgcctcagctcatctgcacaaaaaaggaacccttttgcatctctattcagaaacttagcagaaagcaccttcacctggggggctcacccctgcgttgcttggccagtggctcatgtcaggctgcacctctttctcagcctgctcgtgtggccccacagacgccgaactcgactcccacctactcctgcccagagtgcagcattcccaccggttccagctggttcgcacacttcccacacttcctgagagggctccagcagctctgtgctgtccacctgcactctgtggtctcggccacagtgccagttactgtgtgggttcgtgctttggtgacaaaggtcaaagattttgagtgatctgcagttaagcagaatttttccataaaccctgttattttgggtgctcattttaaagaagtcaaggtgtttaatgaatgcatgcatcatgtttgaaaggaaatacctttgtctgtgaaaagtattgaagatgtaaatgaaatatttttgctttttccatagaaacaatgtgttttggaacactgttttccatagaaacaatgtttcctggaacgtttttctgcagaaacaatgtttcttggaatgttattttccatagaaacaatgttatactggggttatattcatggtcaagggcaaaataccccaagtttttttggcaaatgattacaagcaacatatttacctaactgttattataactacacacagcatagtataacgttgagcaatacaataacacaaaataatcaggaatgttatttgtcttgagattcccaagagaagatttgtgtaggacaacaggagtggctgttatcacaaaaagctgctgaagatctcctgacagcttctgagctcagaatgagaactcccaggagaaggctctgctagacattcagtccacggaaacaaagacacggactgtagactgagaggaagtgagacactgggacgtatgtcaggggaaaatcaggtctgacatcctaggatatgtgtggcgactataccgccccacgtgccagtttcaataaataccatatgtaaaacacatgtgcagaactaagctccctaagtttgttcattcggggataaagttgaaggacagttgttctatctagtacatacacggtggtaggtaaacttcaaatgatcgggaatgatacgatgatggtatacaacttctcagagggaactcacgccagtcgtaaggtaccaccccctgaaatacacacaccacccagctagttagacgtgtgcgctgtctctgcacaccctgctggtgcattgcctcactgagctgtacctaccgtcgcagctgggcaaggcgtggttccactggtggttcctctcacagacgaggggctcgtcgtcacttagtgtgtaccccgggtcacagctgaaagtcactgtggacctgatgccaaagtctccaccgtggcgatggccgttcacagggatgcccgggtccaggcaggaatccgactcaagcgtcacacctggatgcacagaacgaatgcagtcgatgaggatctttctggttgattgaaaataatagagacccacgccatcaactacgaaatagtctcagaaataataagacctgaaacattatgcaagtgaacccaacaatccatggacataaaagccaatgcatcttcaaacatttgacctcgttttttaaaagagagatttatattgttatgctgtttaccagatattatctacatacaacaaccttgaataattaattaacttctctgaattttacttttcttcttggaaaatcaatgaattgcactaaataaagtctaagacttttcctgttttctatttttcaccaccactctccctgtgtcttatatatgtattaaatatagacatatgtacttctatatttatatattccagttagattttggcagtttaactttcaaataaatgcatacatacacccaaacatatacacatataatgcaattaaaaactgtgctagtgttatttttctaagtttgcattccataaatccatgctattttcaaattttagtttaagtcagccacttgcaagatagctactattagcctttgctaacgatgggaaaaattaatgtgcatgaagtaattatgatcatatcattatgagagtttcttttctcctctcacatttctcatttctctttttagaaaaacatatattttaagagctaaggaaaatgagaataagggaaaagaatatcattgtaatgtttacatatgcgaagaaataaaaaatccttgttattgctgtgtcatcctctcagtaaacatcagaacattagaatgaatatctgaactgtgaattaaaagtcttaaaaatatttctaatttaaagactgtttagtctctaaaggtgatcttcgggatattgtttctgatcattgcatatgttttatttttccaaaatttgagtgctataacttgggcctggccccaatacttttttcttaaactgtttttctaacaaattttctaaacactaacacatgtctattgccctaaacaacagaatgtaactgtccttgctgctgcgcagtatggcaggaaagcctccttccaactctggaggagctttcaatctgccagaggcaacgtggatatcatttggctagaaatctattacctaccacctgctcctccctccctctctctacatacacaccacacacatgcatacacacacacacacacacacacacacacacacacacacacacacattcactttcagaggcattgtttatgacttcttccaggacactcccacagattttatgcattattggctccaaatgaacacatggtacccaatgctgggtgaatgatttttgttgttgttgtttacttttattttaaaacccagtgctgggtgaatgattttttgttgttgttgtttgtttacttttattttaagttcaggggtacatgtgcaggtttgttacattggtaaacttttgtcatgggagtttgttgtacagattatttcctcacccaagtattaagcctagtgcccattagttgtttttcccgatcctctccttcctgctaccctcaaccctctgataggccccagtgtgtgttgttccctctatgtgtccatgtgttttcatcatttagctcccacttataagtgagaacatgcggcgtttggttgcctgttgctgcattagtttgctaaggataatgacatccagctcctagcatcaagatcaaaatcaagacaagaattccctcaaaagaagaagctctgctgaagaaatgcactgatctctaggtttctggggaaaaaaaacagttaactaaataatttcatttcttcaaaaaggtttctgtggtcactaaacaacagtgtatgcactacggcaaaacagtaataggaacgattatcttagaataagtgaggattatatattaatggttttaataagtgaggattatatattaatggttttaataatgaaatttataaaccataaactaaacttttcccacacaaaatttacagtgaaaagagacaaactgcggtagaaataaaaacatcgaattaaaatgttgaattatttacatttcaaactgaataaactcttaaggtcacaattgatgcttagttccaatattatgccataatacttccattcatttttaaataataattgacaccactattgaattttgaaatatgcagacattgttctcgttttcattacaaactgtttgaatggagagtacaggacgggaggactgttgagtggtagaattatgatactacattcgatttccagttcaactgaaactggccatgtaaaagaatcctgaaacaagaaaatggtgagaaagaacatctggaatttggctgggcacggtggctcatgcttgtaatcccagcactttgggaggccgaggtgggtggatcacctgatgtcaggagtttgagaccagcctggccaacctgatgaaaacctgtctctgctaaaaatataaaaattagccaggtgtggtggtgggcacctggaatcccagctacttgggaggctgagtcaggagaaacgcttgaactcaggaggcagaggatgcagtgagccaaggttgtgccgttgcattccagcctgggcgacagagcaagactctgtctcaaaaaaaaaaaaaaaaaaaaaaaaaggaattttgtagcaggtgatttatctccaatggaacaatacatttatgataaactaagaccagtctgtggacacaggtagccaatttaccttgtgggaaaggtagggcaaagtcctaccttctttcccattctgtctcctgcctgacagcacaaagagaaatacagaccaccggactttgttgaaacgacgtgtatattcagagtctgttcccactccttcttacttgaaccttaaagcaacaatgaatttttgatacaaatagttacaaacattactttttttttttcaattggtctttgcaaaataagtgactgaatacatttgctacttaatgaataaagggagttgattactttgcaaataatccgtgtgcagctcatacggaggtacatttgatatgagcagggttctgtatgaatcaacagtctttataaaactcctagtccaaggaaggaatgaacatttcctgagcacatttcatatgccgagcttagagatgtcacttctcacagcctccgagaggtttcaaaatagaggttgaaaagtcacagttgataaagccagtgagccaagaaattaagcaaactggccatgttacattatttactgatattgaaacctgagcctttgcctgcttttctcctctctctcatgtatgcatccatgcgtgtgcctgtgagtgttagcatgcatgggcatgttatatatacctttgcattgcatccagtaccattacatcccgaccactctcctttccttttctgatcatataaaaagtcaccgaatctcagcaaacaattggtgtggtgtgcacgcacatataaaccactaaatatactcctttatcacaatgtttcttccatgaataacatgatatatcaatcacacagtagagtatgtacatttacaagtgatgaatctttcttctgccttcagagatgattaacaagatacttttgacagcattttcaaaaaatgctctaaaattaaatggaaaaccttcatacccttgagaattccatttattttccaatttcttacaaaattatgacaattttaaagtggtgatttaaagatcaacatacaaagcagatgatcattctggagcgagaatgcaatcgctattatatacagacactgtgccacattcctcgtaaagaatggctagactgtcgctggacactaacatatgagatgattcctaagactgagtgcatgaagcagaactgcaattctaggtttgcttttacaaaagcctcaaaaaaatgacttcaacctttgagccacacaattcagaaaggccttctggagtgaatgctgtttacagtagctcacattgccttgtagcaccgctgcaaatataagtcagcctcgagtacctgtggctgtgatttctgcaacacattttgtctgtagagatcattggcatgggcctctatgggcatgaagaagcgtcattaataatttcagaaagcaaggagtgtttataatgtgaaacatgtatgatgaaacagaagagatgagcaatattcctgtttttaagaggcataaagagtttgatataaatcattcttgggtcatggatgaagctggaaaccatcattctcagcaaactatcacaaagacaaaaaaccaaacacctcatgttctcactcataggtgggaattgaacaatgagaacaaatggatccaggaaggggaacatcacacaccagggcctgttgtgcggtggggggaggggggagggatagcattaggagatatacctaatgttaaatgatgagttaatgggtgcaccacatcaacatggcacatgtatacatatgtaactaacctgcacgttgtcacatgtaccctaaaacttaaagtataataaaaaaataaaataaataaaaattggatgacattttcacttgaaaaaaaataataattcttgggtcacaggcaacccactttcaaagaatgtgttggatgagtgagtgtaatcattttctagtgcctgcatcttggcttcagaacctattttgtcgaagggtgctagacggggttacctggatgaaggggttggtagcatttttctcttccacgctttgccactttttctctgtctctgcttttctcgctggactcattggttcctttaaccctccgtgacctctgctggccttggccccttccctcctgcttgcctgtgggttttctctctccctggagcccgggatctgcgtctgccttcaccttattcagaatcacctcgaggacttgattaaaagctcaggattctgattttcatcatgagttccctgaatcacaatatttggaatctgggcttggggctgtacaatttactaagctcccagggatgtgttagtgcactatgatgtttgaagaaaccttccccttcagcaccgggtaaacggggacaccctctgagtgggttgcgagcctctgaaagcactcatatctctacaccacccacagaaatagcaaccagaacatctgagctggtattcaggcattggttttattttaaaccccgcaggtaacccttaggtgcagggctggtgataagcactcataaaatcccaggcctttcctgactcattttcttacaacaagcaaacaaaaagccatgtcctgaacctcattcacttatgtacatttccatatgtctcttcaaatacacagcgactgatacataaataagaagtgatcccaagtcaaggttcagtatcacatccttctgaggtcctatttctcccttaagtcagaggaataggtgacaaacctttgagagccttctggaagttcactatatgcaagtctagatgtgtgtttagagcagtgagcctttgaagtcacagtgctggaaagttccaaacgcaacaatttcctgtcttcactcactaggtgaggcctctgctcacttctgtggctatacagctacctcctgagacttccaacaaggtggaaagaagagggaatgctagactctccagcagatcagaactttatgactctcacacaattatcactgtataaacaggcatcatcttggtgacagttttcttcttctttttagggatggagagaaagaaaaatggcatttttttcatgtgtctgttggctgcataaatgtcttcttttgagaagtgtctgttcatatccttcacccactttcacaatagcaaagacttggaaacaacccaaatgcctaaaaatgatagactggattgagaaaatatggcacatatacacaatggaatagtatgcaaccataaaaattgatgagttcatgtcttttgtagggacatggatgaagctggaaaccatcattctcagcaaactatggcaaagacaaaaaaccaaacaccacatgttctcactcataggtgggaattgaacaatgagaacacatggacacaggaaggggaacatcacactctggggcctgttgtggggtgtggggagggggcagggatagcattaggagatatacctaatgtaaatgacgagttaatgggtgcagcacaccaacatggcacatgtatacatatgtaacaaacctgcacgttgtgcacatgtaccctagaacttaacgtataataataataataataaaaaaataaattatatatatatatatatatatatatatatatatatatatatatagaaaaaaagaaaaatggcaaagagctttactctctgaggggtactccaggtgatggaagaatgccttacgaagcctgccctctacttttaaacacaggataaatgaaaagaataccaaaacatagggtagtcattcttttaagattataaaaatagttgtcaggattacttacatattaaattattatattatagtataatataatgtgtattccatattttataataataaaatattattattataatattagtgaggatgacaagctaaatagaaatttatgaaatgactttttatcatttcctgattttccagaaagagaaataagaagaagacatttatttaaatgacttggataaacaaatgaaattagtttcttctgccttcacttagcctttggaacacattccctcaaatggaagtagaaaaagcaaagtcatctacagctacagaaatacagatgaaaagaaaggaaaagtgttctaatatttgtcaatgcctgaaaataattattctctgaagtttcatgcactatatatctaagagtcaagaaattctggtgtagaaaaagttggggggaggggtgtgggagaggatgagaaaatacaaggcttattagggatcttacaaattcagatcactgcaatgtttacacatattgttacttcaaagagaagtgacaactcgaatggacattttaaagaaacaaaatgtaaaatttcctggttcttaaattttactttaagtttcaaaatacgttactttggagcaaatgttgtatatctatatatgtgaagagtaataactgaattaaatttgaaatttgtcattaagtcattgataagcaattttcctgatattggaatatttttatctaaaagtagacaaaatcttaagatatacatgcatatgcacgtttgtgtatacttatatgagtatgtaaaaccgaggaatgcacataacaggttgttaatttaaatgtgctggagtggggctcagggagagggtaacaagagtaataggaggtgatgtggggaatggaaggcaagaaaacgaacaaaaggagatttgaaacccatcatagtagacatgattctatgcatgcatttgtaaaatcatacgtgtgggtatatgtaaattttaaaaacatctttacaatagtacttgagataaagctctgaaaaagaacagccataaaactttggcaaaataaaagtctgattccttcaggtccaatagtaattgccactttttctcgctttttccgtgctactctttgagggaagtgttttcaaacagagaaaagaataacagctgctttgctttgttttgttttaattggctaatgttaaaaatgtattcctaggggtgattcccatcagctagatttcagaagtatatttgcataaatattattataaaataatacaattacttaatctcatcatttcagaagctaaaactttgatttcagtaaacaagggcaggaaaactttccatgtggaagtttggactgtttgcaaaatacattccattataatattttgacaattgttttaaaatatgtttaataattgttttaaagtattattcatgcttgttgaaagactgttaacaattgtttggaatttggtaaggtttagcaggttttaattccttcgcctcttgttacctgactttcacccagtgaaacgtgtctatctatactcagattcggtaccacaaattgacctaaccctgtttttctagcaaggatccttttctccattgcccaggttaacataattttagtaatatatcctataagacttttgctcagaaagtacattttctaataatagaagtatattattacttccattattctatgcagaagatgaacccatttcattgtttttattattttactttgtcatacgcgatggatacgtatttttgagagttaaaaggcagtaattccaagatgctctcttatgaataacagaaagttcttacaattgcatagtatggttttgctagagtcaagcaggatcagtaaactagcacagtcatctgcaggctggaaataagaacccagatctttagttctcccatgcatgctgccctgccgggctgtcaagggaaggtgcaactcactctcatagtggatgaggaagccgatgctggagcggctgttgtcagtggtgaacagcaggtacatgaagttcccggtgctgatgaggaactggggtgcctgggtgccgtggtactcgccgatcagtggggacgaactggctggcccatctctgacctccaaggtgtcataattgacctctgtctgaaatctgcaaatatatacatcccatcagaaaagacatgcagaactgccagcttacagacgtgctcctgacatcctcattccttaatcagaaacccatgtacgttaacatgaagaaaatagttgaaattacatatgcttaaaacttgggtacaaatataaggatagtatgttcttttcttgatgagacggcacagcttaaatccctttctcttatctaatattctgtcttacaatattacagacacaagaggaggcctttattcagcttaaacaaaaatactatgaaccagattagttttcttagatgatagattgatagatagatagatagacaaatagattattcccaaatagaaaaaactcaattatatatttttaaactatttttaccattccctatttaacataattatagacatcttaaaatgggtgcactagagtgaaatcatctcttaaacaaagaagatcattaaaaatgtgtgatgagtttaaacacctttcctgaaaaaaaaaatcctgtgcctttttaaattgcaataactctttcaagacattagaacaaccatgggtatgttgccatttcagacatgaaaggatactttaataacttgagaaagttacaacagcttccaaaaactgcttaagttttcttatgcttcccgagaatctagcctgagattttatatatatatataaagttgcagccacttggctcccctgtgatgcaatgtaggtaccactccaggcacggagataattttctaagtgggcctatctgatcctcgaagagctaacccggtttctgagtgcctgacttggctctcagggagcagcttaagcgtcataagactctgactcactcagtcactttgagccaaaggatcccacggaagcctgtgccattagctctgtgctggatgttgctgatgaattgggagaaaacttgggagaggggaagcaatcttagcctcatggcgtgtagcaacagaaaacgatgttgaaaccaaagggctgtgtcctgtatacattagatcatggatacactgattagtgcaaatgcacatgattacctattcctgcaactagtgaatgtggtaccctgggccccattcttccataaagaggaatttgaaccatttgtatatcacacatctggaccagaataaggccacaggctgccacatttgggattgcatagtgccaactttgtcttatgacactattctaaatctttttcttaaaactgatttctcagttgtttgagttcaaattcaagaagtctggctaagcgtgaaagcaatctcctttgacatagtcatgctgaagttgtcctatcctgtttctttagtaacagtgaggactgacaaagtgcctatttcaacagctggaagatttccaggatgacgttggaaacagaaacatctggatgttctttgctgttgggcagcctaacacacaccgcctggcaataccatcagcacagagctcagaatttgtgcgcacaatcccatcctttaaggtgtcagcccatcggtcatggtggaaatgaacatttccttatgcaattcatcttttaagagctgtgtactatgtctagagtacagatcacacatgtctaaaaatatcagaaatatcgggtatttccaaatggaatttagcaaaacatcacactgaaacaatactgaatgaatgagattgggaaaaatcaagcaaatatcttccttcaggcaactgaaaatagagggctaatagactggccagagaagaatataggatcactacttttactaaattacttaaatttgatacgctgctgggagtcagggcgtgcttcagctccgcctgccaataccagtaagtggagaaattagtaagaaacccaacgtaatcaactgaatacttacagagttagtattttttcaaatgattgattatacacagtaattcactttctaatatagatggatttataaacaacttttttctcttgttctaagagattgtgctattggggattattattattttgtcagaagcaagtgaaaaaataaaaataattatttcaaataaatacaattactgaaagttaacacaactcctgctgaaaaacctttcctgtgttgatgttagcattgatcatttgaaaacaaaaagataataatacaatgaagttcatctatcttgagacaccataatattccggatactgaaatccagaatgtagtctagtcaagaagaaggtcattgttagagaaagcccaatgttatgcagagaataaccttgaaactttcaacaaagatgcctccctagcctttggttcatgttgctcatgacaaaatctttttagtttttaatcatcaatttggtctcagtgttgagagaaatgggaaaacccttcttatatagaactccaatagcctgcttattttttaataaacaaatacctacgcagcccagcatgcttattttttagatcatgaaatgcattattaaatagctaagccaagcaacattctagtgataatgtcactcataggcgattagttggtgattgatctgctgtccgcaccccattgcccgctcagcatcactagctgccctcgagtgaccagcagccaccaccagaacaggagagctgatttcctctaccacagaagacacctaagggaccatgggacccagagtggtttccatgtgcaatcagacatcaagctgaattgattccagtgcaggtcccaaacccagagtcagatacaagggtcggacctcgggaatggtcctccaggactggcagttcccctactaacctccagagcattggctcactgtgggcttagaggataccactgaagaagaacaaaacttacaagtaagtgcctgtttctggtaaagtgtgctcctatgcgggaaccgaaaaaaactgccatctttttaaagtttaagatccatttactaaaactatggaagagacacacaccattgggtccaaatgaagactaatttttttcttacctgtcaaaagttattttgatagagtggcctggttttgcttcaattatccattcacaatgtaaagaatccttataatatcctggccatccaggaggcaaaatgactccgctggacgctgtcagatgtccaccacatggagctaaaacaagacgtagaatatctattagatccaatgagacagaaggatatgccataacaatacccggataaaagccagaatctgcttctgtgttcatagactgaatattttcaagtatcaaagcaaatcttattcccaaggaaactgtacatttattgaaagcagggtctatatatgctacctccatgtacttaccattaccttgaagcaaagttctttttctctagtaatggtaatgtatacgtgagttctctgtgctaactgaattatctcatttaactgctaaccatttcattacgtacatgcccggttatctatagtttacatgcatttggaatttaacaattatctatacataagcaaatgtaaaatgaccttacatctcaagatggatacatatacacacccttaggtgtgtgtatgcatgtgtttatttacttccattgtgtgcattttattaaaataaatagccacatgcaacatattatttgtgagtgtgaaacaaaacaaaatgttcaatcaaatttgataagtgtagaattagactgcattgaaccttttgcaaggttttgtgacagtgatttgtaattgcaaaggagaaataaagtttgaaagggtatataattactgctcagtgaaagtgattatgcatacctgtatcatctaaaggaattttaaatagcataccaatatttcataccgtaattaagaatatgtccctggccacatgttttctttcagattttatgtattctctctcaaaattatttgccattagcaatcatctttgtggatttatagatatcaaataaagtacgtgaaaatactccaaggtgaaaaaatccttttggaaaaaatatttattttatttaaaaatggccatatgtataatgtaaaaatgcaaaaagtttatatcattttagccatgttttgatgctagaaaaaatgtgaattagtgaaatttatggatttaccaatagtatcttaatttacgtcaggaaacaaatacagaaaaaataaaagcaaaaatttatggaaactgcatgaccatatattggaatgtggcaaatatatttgaagtaacgtttggaaattttgttgatatgggaaaatctttgcaatagaatgttaaacttgaaaagtggataaaaaattgtccatctgttataaatgtaataaaagaaaaattttattcagtgaacacggcagtggaaattaaaaacatgttaataatggatagcactgggattgctttatagatcatattttttgatatattatatatatatatttttcccaaataagttgcaattgttatttttatacctatgcattattctgtagtttaaaaatatgaaagcagggtaatttttattaacttgagctcctgaagaacacttgattttttgtgataatttttaaaacaaccaaaattatacttattaatattttaatttttcttgttaatttcttaaattcacatttgcagcctatgaatcacatatcgatatacataattatatgtaattcaattcttttgttttttaaagcaatgcaacacattcttttatgaatacaacataagcaaaattaaatatgttaaatatataacttttattttgtcatgtttaaccatccaaagatactatataagaaagacatatggcagatgcagaattccaaaaaaattatgatagttgagcaatttctaaaatctgcatgataagttatttctatgtgtgaatttccatataaatacataaccaaccaaaagtttcctttactttagtaattttattttgcatttttatgtttcttggaatatgtctaacttgccaaatattaattattttattatactcttacccatcactttgtaatttacagtgtatgttagaacctgaattgctttatcctgatgaaatagacactttaataataacactgccgatgagcaaaatttacactaaaataataatgatctcagtaagtagattgtaagtaagtaaatagtaagtaataagtttgtattagtcagtttggattagattacactgccgtaactaacagccctgcaactgtagtagctacagttggaagtgaatttctcacaaatgtggcatgtctaggtctgtgagacacaggtcccttcttcagttgctatggcaggtggaaaaaggtcttaggaaagcaatcaaagacgctgacccagaagttgagtacagcatttcctcatatacctaattgaccagaacccatgacaaggttcctttaatctacaagattcaagaaaagacattccacctgatggagaccaaaaatatttgatgaacatcatcaatcatgttcatactcacttagctgataacaaaaaaagcaaatataccaatgagccaatgaggtgtttagaaagcaatttcttctttgctttttttttttgatgatttaaattacagtgatgaattccctgatactgtatttctaaaatacacacacacacatacaccccttcttgattacatatgtgtattttcctatggctttatttttattagaacaatctcattggggttacattaatgctggcttgatgaaatgttatgaaggatgcagcctgtcttctccattatctgtgatagtgcacaacactaaggttctctagacttgaaagagaactcactcacacccctgtagggtacttgtgtctttttcaatgttcaatccttaatcttttttttcaattcttttctatgctactttacgcacattttatactttttatgtgagtcatttttggtattttatcttttgctaaaaaaatcacccgttttctacagactttaagctttgctgccacagagttggtgttttcatgtatagtcatttttccccaaaatagcttgagattttcatgatgccactgagctgcattgaggaatacgagcctgttagaagcagaagaaagagagaaagagaaaccttttgcccggaggccataaaatttatactcaacatgtgcctggcatccagaaaattctgccagaataaataaataacctacgcttttaaataaaaaaattgctctattgtgagcttttcactgtttacgtaaagttatattatttttatggtatggataatttctcttttatgttaccaaatatctataacatttttctttcctagttctttttatcagaatcataaacagtttgtctattttattgatattaacaactcactcttgctttaaattgtttataacacttgaattttattaataggatcctaatttatttttgttttttctaactttttaatcttattattaaatttctttattttttgatcattttgttctacgttagaggacttaaagatagacattttccttgaaacacaggttttgctgtctcacattgtttctcatagaaagtactgttctaatggtttccagatgggatagtataggcattaaggtttgagtttctctttaatgtaaaattatagtggactttttatggatagacatttgcttgtagttctatttttattacatgtttctactttaattggaatattacagggcatgagacctataacttattttaatttgttaaggttcactttgtggtcagttatataattgatttaaacaaaacacttttcaagaaaaacaataaataagagtattctgtaagggatgtgagcttcttcaaacatttcttaaatcaagtttgttatctgtattactcactgcttcattgctattttatttttttccctactagatgcatttacttctgaaagttggctttctatttgttttcagcagaggcagtgatcggggtacccgcctgttccatcggagcgtcccctaccttctctgaggctcagctgcactcagtcattaggtttctcaacgcaggtagacttttaacatcttttcctattaactttttctttctgccgagggcttcctttgttaacaacctatagctgggttttgcctttaacctcatcctgtttgtgctgtggtccacactcaccctgcaggttgtaacatatctgcaatcagcctattatggtaaaggacataaggcacagcttgacttgtggccaggacagaacagagatgagagtgtagtgttcactttaaacttctttctcctgaaaattcatgcttccaagtcagtgaaatatgcttggctagaatacgatttgcacctgtgactaactgtgccctatcattagtatcatatctttgagcaccacatgtgtatatatttactcatttataaaagatgaaaacctacccatttattaacattttgtacagcataaaacataaaaactgtacatttaccatatgtgatggaaatacatacaaatgaaatttcagctattaagagggttttgttgcccttctatttatcaatatttcacccatgggtggtgcttcttgtccacccacaaattgttttaacaatgtatgaaaagggtgaacatcagaataccctcctttacgtgtagtattaccagacgatactataaacaggacctggttagaagtttctacttctcctctgaggtcaggagtttgagaccagcctggccaacatgttgaaacgtcccctctactaaaaatacaaaaattagccaggcgtggtggcaggtgtctgtagtcccagttactcaggaaggctgaggcagaagaactgcttgaatctgggaggcggaggttgcagtgagctgagattgcaccactgcactccagcctgggtgacagagccagacgctatctcaaaaaaaaaaaaaaaaaaaaaattgcgtttctactttgagtaatggtgagtaacttctttggaggtgggaccagggcaggatgaggtggtgaaggatcatgcccccaccatactgtggttgtcatggaggagtttaatgctccacacctagaccccagctctgcttagagtccttgatagagatgatgggtctgagaatgttattccgaggtattttagatagggcagaaattctcaactgtttatgatatttaacatatattcctgttctattcacttattaaaaataaatacatgttgactaaagacaactgagaaaataaaaataaactaagagggaaaaatcacccataaccataattaacattttggtgtgtagcctttttttagtgttttacaaagttattatcatgagatatgtatgtatttatgacacatgtgcctgcatcctctgtttttcacatgctaaggacacctgagacgctttgagcttatgatctttgtattgatacctgttattcttcatgatttatctaatcagtcctctgctgtttgaagctgaatcatttccaactcttcactgctataaatagtcttgcagaaaacattcttgaaaaaaacctgtatagttgcttatttctttatgatattgatccaggaatataacttatgactcaaaggacaagaataattttaagagtcctactaagaatttacactacaataccatgattttatataatcaatagtatgattaggaaatgccagtttctacataaccttttcaataatacgtctcattcacctgtttaaatctatgctaacaagatagacaaaaatgatattttacttttcttcttaaatttgtacttctttgatatacactagaggtaagtttttaagttttttaaaaatattttcttagcttattgcgcactgactattctgatatggactgtgaacatatactctaagtaaacatttttaaaatgagtaattattagaggcaacatctttttccttaaaatattttcctctctatatttattagataagtaaccagaacagaaatatgaagaagaaaattaggtggtatttatgtcggctgtaacaagaacaacaaaatagttaaccataagcaacactgttataggttgaattctgtccccccaaaaaatcatacattgaggtcctaaccctcagcgcctcagatggtgactgtatttgaagattgggtacttgcagatgaatttagttaggataaggtgttgctggaagaaggggacccccaatccaatatgattgtgtccttttaacaaggagaatttagacacagggacagacacacacacagggagagctccttttgagtctggaggcagagatgagggtgaggcttctccagccatggaatgccagagattgccaaacaccgccaggagctggaggaccagcctgaggcagatcctccctcagagttccagaaggaccccaccctgccgatgacacctggatctcagacttccagcctccagaactgggagactgtacactcctgttggttaagtgactgtgtgtggtattttgttagggcagccctagcaagctaacacagtttgttggtttgtgtgtgtgcctgaagatagatgtgtgatttcaaaggagaagagcggggggtggcagggactgcaccttcacagcggggcacggtggagctccagaccacgttcccgtcttgcagtatgcaggtaatggactcggatccctgggtcttgacaaagccatcatcacagtggaaagaaaccgagctcccgagtagaaacctgtcaccaaaacgtcgtccgtttataggaatgccaggatcatggcactcattctgaccaaatgctgaaagaaaaagaagaagaaaaaaggaataaaaatacttgagtattaattacatgtattaaaaaagaagaaaacagaacaagcttataaagcattcatataatgtatataattatataaatttcagttgtatcattcatagatagataatacattaataaataggatatcagtgtctagtgagaaagagcgagcagggagatgaacaaatataactatcatttatgcagcaatttagggtttgaaaagcacttttcataggagcttagacaaagagagaactgatatggtgggtggtagaaagtgtctgggctcaagatttctctcgttagaatcctgactttttttcttactatgtcagaggactctgacattgggcatatgactctgacgctctaagcctagctatctttatttacagaatgagagactactaaatttatatcctctagttactataacactaaatgaaacaattattgtccaattctaagtattctgcctaagaaactaggcagttagcatatcataatgtagtattactcatattaatattctctcactttattccatctacagtgcatttaagtagatattcttacataaaataggttttaaaatgaggagcctaaagcaaagagaatgagctgtcattaaacttcactaattacatactagtgctgtattttaatccttggctcctgacatcatattacacagttgtttttactacactactttgttgcaagaaagatgcataagtggctgagtgggtgggtggatggttgtatagatgggaggaagaatagaaggaagaaaggaagaatggctggctggctggatgaatggagggatggaaagaaagatgaatggagggatggatggaaagatgaatggaaggatggatggatgaatgcatgcatgcatggatggatggacagatggaaggatggataatggaaggatatggatgaatggatggatgggtgaaataatagataaatggacaaaacgatggaagggaaggatgaatggaaggatatggattgatagatggatggaaggataaaaggaatgatagacggaataatggatgaatggatggacacatggatgaatgatgaatggatggatggaaagatggataaacaatggattgatggaacgatggatggatggaaggatgaatggatggaaggatggatggatagatggaaggatggatggaaagatggatggaagaaaggatggatagatgcatggatggatgaaatgatggatggatgaatgaaaggatacagatggacagatggatggatgaatggaagaatagatggaataatggtttggtgggtgcatggatggatagaatgatggatggatgaatggatggatggataaatggaaaaccggagagaaagagatgtaaggagatgaaagagagaggagatccagcttcttagtttaggagtgatgaagccacctatctaaatacagtgatacatttgtttttaagttttcaggataacactataattttactactgtcattttcataatgattataaaacctctgaagtatcaaccttgaaatgcaacttcacatacatataagcaaaatgggaacatgtaagtaaaatgagaacttggatgtgttgactgtgtgggcgtacttactggtgtaagtgatgttgaaccctctgccagtagtggaatggtcagactgaaattccaagcgaactatatgcccactgctggccagctgggaaggcacttcattgccagaaaaagtacccaggacagttatgtcagaaatgccatcatccttgaccgcgagaaagtcaaactgaggctcaacatcaaaatcattaaagattaggtgaattcgacttcctggctccgagataatcaaccagacacagttcatgttgttcccatattcctctggataatttggtgacagaataatcccagatgatgccgtaaagttgaagaaacatgaaactgtgaagatgcaaatatattttcaaacagttatgcacatatccaaagaattgccatgtgaaacagacagctaagaacctggaaaggcaattcatgcctgcaaatagctatgatgatccaactattttaatataagtaattctggaccataatgttttctcctttcctaatttgtaagtcgaatatttcattatcatatagagcacaaccagaacctatacataatcaagcacaagcgtggttcaaaaatgatcctttccagttgactgaaaacgtgtgccaaatattataatttctagttataattttctgccttcagaagagcaaatattaatatggaaaagtatattcctatatcataggaacaattcagcctgctctttcataacttttaaatttatattttatactttcctgtgagtgcattttctccagtaatttaaaatttttattagttacagggtaaacatgaataaataaataacttggaaacatcagatcatgttctagttggataatataaagtattttgaaaaatttacttttaagaatgtgtacttaaaatcatatatattatataaataattttttggagggagaaactgttggatttatctctagaatacatttttgcttcttattccatataattttgtacacacttttcagcctttgctatagttatttacaaataaaaaaaacctctcctttaaaatcgactgtgaagccttttctacttgttaaaatagtattcttaagaggaagtgggcagctcatcaactgaattccaaaccaataccaccacccatgctcgcactggtgaacaacttgtgtttaagtgttatacagcattattaagtcacaaaggactctgttgctgtactgatgtctgatacagcagatcatcactggcttttgatggaaacaacgatatatgtgatgaccctttctggtaggaaacgttcaagtacattttgtcgagtagatgtaatgaaactataaattagtttttactaaatgaagaaagcaggcaagttggtgttcgagaacgtccttgcacgtttccagtaaatgtggcaccccgagccattctgaaagctgccctccctaaatgggcggtctgtgtctttctccttttctccccttgcaagatccttgcaggacaggagggagtccaggtcaaggcataatactcacatacacagctgggcttgttgccagaccactgattgttctgctgacaggtgataactctctcccccaccagctcaaaggccgccgggcattcaaaggtgagtgtatctccatggaggaaactgctgcccgtccgcttcccataggcggggattccaggatccccacaccctcccttttcaatttctgaaaatggaaaaacaaatgaacccttaaaaaaacacacacaaggaatatttttatctctacaacttagaaagtaaatacgtggcttctttttgctgaactaaacatcatttttgtaaagtgtttctaaaggatattcaattgatcttaaatttaatttcaaataccagaaaaagaatgtcatttcaaatgaagggaaaggtatttaatttgctatcttttaagggatacacgtggctacacagatacgctgacaacacaaatgctgcaattaatcggtgcatcttctggatacctccgatcttttatctgcaattgctactactaaaatgcaaataccagtttaattttcaactatgtgctttttgctataaacaatacaaataatattcttcattccctactgagtatttaaataaatagaatctatttgaatattctttccctaaaatgaatgttaacactcacttatgaagcagaatgaataacagtttggtctacagaggaaaacaaaatattcagaatcaatctttcattaaaacatcactgtaataacatatgcgtccaaatacaccaaacctatatttcaaatgttgatctgtctcaaatgttaactacacagaatgttttcattaaaatattttatttatttattcatttaaaagactatttttgagagccactgtgtgtcaggtcctgttctaggtaagggcttagtgaataaatgagacaaaatcctcgcacacatggggctggatatgatttggctgtgtccccacctaattctcattttgaatcccacgtgttgtggcagggatctggtgggaggtaattgatcatgggggcaggtctttcctgtgctgttctcaggatagtgaataaggctcaggaggtctgatggttttctaagggggagttgccctgcacaagctttctctttgcctgctgccatcatgtaagacgtgacttgttccaccttgccttcgccatgattgtgaggcctctccagccatgtggaactgtaagtccattaaacctttttcttttataaattgcccagtcttgggtatgtctttatcagcagtgtaaaaacagactaatacaggggttatgttttatggaggaaaattttttaaaattattatttttttgagacaggatctcactctgttgtccaggccggagtgcagtgatgtgatcatagctcactgcaacttccaactctggggctcgagtgatcctcccacctgagactcccaaaaattaatgtgatttgatgatgggtaatttaacacaagatagaggggtatagagagatggatggaggaggaggcagtgaagaaaatgccctgaaggaagatggcaatcagcccttcgaaaaggagatgtgatcccagtgtgccgggcagggcagtgagggacaaatgggcagaggtggtttggagcagaagggaggccctgcctgttgggcttcctgtttgtgcagagtgatgcaggaagaaggcactgcagagctttggaggagacctggtgtcatctgactacagacttaaaagatctctctgcaactttggaagagcagaggcaggtgaaaagtgagtcccaggaaattcagggtggtttctctggacaccagtcccaaaagtgcattggttttacttttagaattcttcatgggcttgcactttattatcttgcaggggccaagagcaaattctttgtggggtattttttagtaacctaactacttcctttccttttctttatttccataggttttggggggaacccaagcagtatatgctgcgttcattttgtagtcttctattcctcatccccttcacaccctttccccgagtccccaaggtccattttatcattcttatgcctttgcatcctcatagcttagctcccacttatgagtgagaacatatgatgtttggctttgcattcctgggttacttcacttagaataatagtctccaatctcatccaggttgctgcgaatgccattaattcattccttattatcgttcagtagtagtccatcatatatatatatacgtgtatatatacgtgtatatatacacacgtatatatacacgtatatatacacgtacatatatacacgtgtatatatacacgtgtatatacgtgtatatacgtgtgtatatacctgtatatatacacgtatatatacacgtatatatacgtgtatatgtatatatgcacgtatatatgcacgtatatatgcacgtatatatgcacgtatatatacacgtatatatgcacgtatatatacacgtatatatgcacgtatatatacacgtatatatgcacgtatatatacacgtatatatgcacgtatatatacacgtatatatacgtgtatatacacgtatatatatacatatacacacgtatatatacacatatatacacgtatatatacacacgtatatatacatatatacatatatatacacacgtatatatacatatatacatatatacacacgtatatatacatatatacatatatatacacacgtatatatacatatatacatatatatacacacatatacatacatacacacacacacaccactgtttctttatccactcattgattgatgggcatttgggttggttccacatttttgcaattgcaaattgtgctgctataaatatgtgtgtgcaagtatctttttcataacctaaccactttctaatcaagctgtcagttttggcaatgtttgtagaagtgactcagaactgaatttccagatggtttgaaggtctgctgtgagggatatagaaacgttcagaggttgatccagagatgttatattgcattcaagaggagaaactttacttctaagtgtctgggaatatcaaagaagtgaagtttgatacattatcacactagcatgaagatgttgaatacataggatatcaccaacttctgtgaagcagaagagcacacacacaaaatgcagatatttggttgaggttcaaggtacactgctaacgtcacacctcaggctaccaaacaaagatgatccttacagagtcagctctacgaaagcaaaatgttcctaatgcaacacaagccaaatacatctatagagaacacctttgcttaaagatagttcttggagtttaggttgttgaacagagatgggaatggatttacttaaatttaatgcttgggatgccttgaatgagcgtctgtcactgaaaccgacagtgagttcaaaacgctgcatggtttataatagaaaagagctcttgtttgttgtgggctctccattgggaagctgggctgggcgcccagggtcctggcatagcacaaatctgtgcagtcaggagtccagacaccacatttggttttgaatcccccagtgtttgctgggccactgtgatcaatttagtctcatcaagcctcagttttcacattatgagcttcctacttcctacctcaaagggtggccatgagaattaaagaataagattcatggaaattacctggtatattgcactggaaatacaattattactatgattattagcaagccttaaatgtttcattctgcctctgtgatactaaagtttacaatttctccttagagtaaaataaattatggcattttggggatactatttttaatattaattaactcagggagctctactgtgcagaggtttcagaaattaaatgagggtgagggtctttctgctttccatgctgaggatcaagagagacctgtggttagctgatcccaccaaagaggctgatgtttgtttatcctgatgcatggctacggctggccgtggacagaacctgtgttggacaagtcccttatcaggcattaggggttgacaagtaactgtcaaagtagcacggtccaaactcagtaggtttgtgtgtttcacctagcttttgtcctttagttatagaagaaatgtaagcatgtttcatgattatgccagcgatgtttcatttgggggaactatcttggaatattttgcattcttgacttcttacacactgagtgtcactactgcctccaaattatggtgacaaaattcacacaagttttgcaattttatttgaggttcatatcaccttcaggtagagtagaagatgagtaagatactgttgacaatgatacagtatgtgtgtcaaacccccttctctctatgtcagagacgattttaacacattttcttagaaacaaacactacagccagatgcggtagctcacgcctgtaatcctagcactttggaaggccgaggtgggatgatcacttgagatcatgagttggagaccagcctggccaacatcatgaaaccctatctctactaaaaatacaaaaattagccgggaatggtggtgcacgcctggaatcccaactactggggaggctgaagcaggagaattacttgaaaccaggaggtggacgttgcagtgagccaagatcgcgacactgcagtccagcctgtgtgacagagcgagactccgttaaagaaaagaaaaaaaaaaaaaaaagaagcaaacactatgatttggtatcaattcaaagactgatgcacctaaagcaaaaaaaaaaaaaaaaaaaaaaaaaaatgctgtacaaactatctcttccaaattattgaactagatataagatttgataatgaaggggcctacggaaaatattgtttaaggatcattccgaagagcttacatagtccagttacaaatactgtcacacctccctctcttccccaaaatacatcacacagaaattttctctgttgctctagctatattcccaaacatgccatgttgtgcctcagttcaggttctcacccctcactgtctatcatcatttgccatcattgacgctcttggggtcctctcatcgctccccatgctgcatcccattttctgtgttgcagccaaactattttctcaaactccagtgctaaggataaccgtaccttgcttgaaatttttctggtgaccaactttgttcttagtccagatcctatccaggactcaggaaccatgtgtgatgtgaacatcgctgttttctcctaggacatatctcgttagttctttcccggtgtttcacaatccagacttgctacaatttcttttagtgcctgagggtgtctcccctcttcagccttcacacctgctgtaaatatttagtccattctttcctctgttgtcttatttaaccatgcactgttgatattctaattcagtctgcgcttgctcggggatggcctgtatcctacgtgtctctagcaccactctcttttctgcggcaagacctgtcactctgcattatatgtactttttgtgctttactgtaagccctggcagggtctatcttggtgattgttaaatctgtagcacctgttcagagtcaacacacaacagatgcttttctaaattattgttcttattaaacttgcaatttaatgatttttattcgcactcacatttacatactaaattgtattttaattgacaaatttaaattgtatatattgttcatctacagcatgttattttgaaatatgtgtacgtatcataatggctaagcaaagctaattaatatactaattaccttacatacttctgatttttttcttgagaacacctatactcttagcaattttcaagaatataatacattattattaaccatagtaccatgttgtataagagatcccttgaacttatttacatgttgcatttatttatttgaaatggagcctcgctctgtcacccaggctggagtgcagtggcacgatctcagctcactgtaacctctacctcccggattcaagagattctcttggctcagcctcctgcatatctgggattatacgcatgcatcatcacgcccaggtaatttttgtattttttagcagcgatggagtttcaccatgttggccacgctggtctccaactcctggcctcaagtgatctgccctcctctagcctcccaacaggctgcgattacaggcgtgagccattgtgcctggccttgtatgtcacatttataggtgtgtgtgtattatatgttgtatttatatgaagattttatatattctggagaatctgatgaagctcagtccctttttattctttatttcagactgagatctggaaaaatggaaaagtatacaagtaataaatggaagacaaaacttctttattggtaaaatggatctatgttgtttagaaacatatccccaagttttcatgagaataagtgagattttttaaattgccaaagaagattttgagttgcatatgatatttaatttttggcacttacaatgagtagccactagctacagtgacttttcacacttgtcaattctttttaaaaataagtgttcttggctgggcgcggcggctcacacctgtaatcctagcactttgggaggcggagacaggtggatcatgaggtcaggagatcgagaccatcctggataacatggtgaaaccccgtctctactaaaaatacaaaaaattagccgggcgtgttggggggcgcctgtaattcccagctactcgggaggctgaggcaggagaatggtgtgaacctagtaggctggagcttgcagtgaaccgggactgcgcaactgcactccagcctgagccacagagccagactccgtctcaaaaaaaaaaaaaaaaaaaaaaaagtgttctttagatatagtttagaaaactggccctttaacaaaacaaataacagaggaccaaacactacaagagaaatagagaaaaagaactctgaaggtagaaataaatgaatgtggactatgatggatttttaaacatccaatttccacataagaatgtattcggtgtatacttgaatttcaaaaagagctaagaaggcagaaaggaatgagacataactgtgccgtcagaagcatagttagcacgcttgcttgtttccttttgtgtagtcaaccatgggtgtcccaggagctacatggaaacacgtccagggagttgcctggtcctttagattctgctgtggccacatcccctgctaacaccatttctcatgttgatggcatgtcaggcaaggcagcactgtacatggacacaagacagctagtacagaactcactgagcctacactgctgtgtgttctttgttctctgtgacctgtctccacaagtagatgagaactccatgaatgacagctttatcaggttctttctcttcccttccaaaaccacttatgaaagttctttgtataaaaccgctcaatgaataaaactaaattctaaaattaggttcacccatagtcatgtatatgaacagcaatttctctaaatctcaatagatgactattggattatataagctgatatccctgaattttagtgagaatgatttaccaagagtttaaatcacaccacgttctgctcccacggttgtgcttgcattaccaaatttattctggatggggtaatacaatttctgtttgacatatgaaatatagcaggttgctgcagtctttgttaccatgaagagttgagattcttcaagttatcacaaaatagatgtactatgatgatgttccataaataagagggacctttaaattccatacggtttgctactggattgcaattaatattctgcagaaaacactctgctgtagctgttcaggaaatatttcttaaaaatagtggaaaacatttagatttcagacagctaactttttatctcccaaaatagcagaccaaaactcttattgcctgtgtaagatatttacacaacttcttatatgcttattcgtatgaaagcaatgttgtctagcttgtatgtctgccttttttctcatgtgctatttgactaccatctgtattctgaacttaaggcttaaaaactttaatcacaaactagaatagataaggtgtgttccagggctgccatagctactacatgcgggaagtgttaatgaacagattaaaatggcccagaaatcagtacatgcttccattttcgctgaagagagagtgagtaaaagcaacagtttcttgtgcaactgaccacactgtgcctgctcttagattctcattttttttccctgagactttcactcagaaatccctaaactaattgatatattttcatcaccttcggaaaacaagattgcagcacataaatggaagtctacagaccctgttttttggagacagtgtgagaacatgtccacgcggtatggacgtggcacatgctcccggcattactgaaaaccatatgacacagcacaacccagcacttggacagacatggagcctcccatgactctctccttgtccgtcaccatcagtgacataagcccagaaagtagcggattgctgttacagtggcctgtgcttgttaaaatgatgtgtgatcgtgcttaattatggtgctcagggaaaattcggttgtgtacatgaaataccatgtttgcttttcatacaaatgtgctttgtttgactgaaacaagaatgagatgattccaaaggtgtagtcaaaagctaagatggagcgggaactacacctgctgtgtttttccttcccttttgtggccccagtgtgaaatgctggactctggaaattcgggctataagtaaccacagaaatgaactgtctcagcagctcatctcgcttgtctcatggagaccatgagagtatagattttcaaacttgtttatagcactgtccaaattatttattagtgctgttggaattcagaactttgttggtgatcctgcccagaaaactaagagactggatgtcagagagcacttactgggaaagcaacaattttattcaagatattggtcagctataatcatggagtcatatttacttggccaaattccctgacggtcccgctgatctagtaacccgatttgggtatataaaagcattgattttgagctgaagattcagatccaacaatgtcctgtgtctcagctcaacaggtctgtctgccataacctgcaacgtaatgagaagcaggttttccagtgatcccactgccctgcaccagagcaagagaaatctacattaacatcacaggacatctccattgaatttccaaattggtgatcatgcagacacacgggattgcacaaactaatgtcagaccatagtaggaaatgagaaggaagaatgagtcattttaaaggatagaatttttcctttttaatattatagatttcttttaaagacatagaaaacgaatacaacagccaaggtagtaatgagaagcacctcagaatacatgaaaggtatgcataatgcaattttactttccagaattaattagtagaaatttagtcctgaaaaatcatcttgctatagtgttcctttcacttacattatactcgaggcatacaaatagttaatgctctgctgtgtctgttgccattgtttaaggctgaaacgccagctaggaacctcatggaggtcgaggcttctcaatgacgcaagctgcgctgttctctaattcttaactcagcaggaactgaactttttgccttatcaagtaacacatttctgagcacctaagtggtcatcctcacagaaggatactatcaggcttacaatctgcaccaaccagatgctcctggttgattcttgagttcaggttcactgtaaacttcaaaaataaaactaactccactgccgtttccaaaatgaataattgaaaatgaaggatgaaggtgctgatcaccagatgaagccagatgaacaaaataggaataaaaatttactattctagaatttctgtttttcaagtaataaaaatacacacatatttgtatttttaaataagcatatacactgatttttaataaaaactctatgtatttgtgtttgcctgtcaggaggaggatattcaagtaaccctcagctaactaggaaattctgaaacctggaaaatcccacgtctggccaattgctatagattcgtaaccccttttatcaacaggattgagaagcaaataaataggaaaaaaaaagtggagaaataattcagattactttcgtcacctacaacgttctaatcaaataccaaatagccaacatgtcaagaaaaaaatctgcatatctagattcattaaaagaaataatcttcatcaatacagttttgcataaattaattgctttattttcctgctacttctagaccacagtctggaagcaggatagcaaagtgagtagaaatatagactcttggaatagatcctgttttagatggaatctcagcaacatcaattatctgtgtgacttcctgtgagttgctagaagtacctgtttacctaattgtggataataatcgttcgcatctccttaaagatccaatgcatgagaagccaatgcacagtgcctaaatagagcccagggtatattaagttctatctctttgctattattattaacatcatcattgatattacttttaatttcaatagttgggaagtcattcaacttaagaaaagccaagctaagtcctcaaaattatttgataaaagtccttaaaagatacaactactttatgatattcctggaaaacgtataaccccagtctaaccacaagaaaagcatcagataaatacaacctgaggaatagtctacacaataccaaccaggactcctcaaaatacccaagatcatcaaaccaaggaaaggcagtaacaattcagagggaccagatgaggcaagacaattaactcagggtggatctgggtggttcctgggacaggaagaggacactaggaaaaaaaaaaaaaagccatggaaatctgaataaaatacgaccttcagttaataacgtttccatgttgtgatgcatgtacctaacgatataaagtattaaatatagggaaactggctgtggggtggacagaaatgctctgtactatctttgcaacttttctttaaacctaaaactactttaaaatcaaaaatgttaatttgaaaaaagaaatcagtgttgtttttaaatgtgtactactgttctggttaaaaattagtcaaattctaaacttttgggtcttaatacctttgtcacgcttgcaatgattccttttaggcataggttatggaatactaagactttgaacattctattactttcaccattctgcgcatggattgaaaacattccttaaacacataaagatggtacttgttcacgctccaatatattaaaaataataagtaaaatgcttcccatgattgagaaaaatcactctttcctgtttctcttggtccagttatctaataatcagaatttattatatattaaagagactaatactgcctatttatagttttcctctgtgctgtagattattaaaaaaaagacactaaaagctgtgtaaagttttactgtggtggtggtcattttattacaataactgaagacgaagcttcatttgctgattctatgctcattttcagtatgaaaaaatgaaaattacatctttaacattctattaaattgatgggcaatttcttttcttaaactcatactacaagacagttgaaaccaagtctggaggaaaatgcagagtcattaaagtataaaaggtggtggtcttcagagactggatccagggattggccctgagtaggtcctccacaaggaaacagttggatataggacgagaaggactgctctgagcccacattcctgagggagccacacattgaatgggcagagataaaggaatgaccaaatgcaaatgagagttactatatacaatcccaggttgtgattaagaaaagagaaacatcattctctaccttatcaaagacttcattttatttacacaaaacaaagaatagaggagttctcactatgaaaataacaattttgtagactttagtaacatcagccaattcaagataatatttagcctgtttgattatgtgttaaaccccaagataaaaaaaatccccagatttctaaattataaattctacagatgtctttttcttttttttgagacagtgtcttgctctgttgcccagactgcagtgcactgctgtaatcttggctcgctacaacctccacctcccaggttcaagcaattgtcctgtctcagcctccagagtagctgggactgcaggtgcatgacaccatgcccaggtaattcttgtatttttcgtacagacagggtttcaccatattggtcaatctggtttctaacttctaacttcaggcgatccacccaccttggccgcccaaagtgctgggattacaggcgtgagccacggcgcccggccccacagatggcttagagtattagccaccacaaccggccccacagatggcttagagcgtgagccaccgcgcccggccccacagatgtcttagagcgtgagccaccatgtccagccctgatgtcctagcgtggattctatcatctacacctatctacccttcccatgactagatgatcaatgaaatctccaaggtcactctactctgcaccagtgtttcattcctttgaaacttagtttcacttattttcagtcttgttgcctctcaccatgaaggggctgctgtttcctcaagggctggactcacacttagccactcagcattcttgatggcatacaattctgggtacctgatcaatgctcagccaataatttggggtttgttgagggagttggaaaaaatgagccagaagttaaacctgaaagaggaaccaagaatcttggatttggggccactttccacattgttcttccactcacttttcccaaaatgcctattgaaagaatctttcaaaaatatcatgtgcatttcagtaattcttataattgagtctgtctgaaagcattttaaaaggtatactactgaagaaatctattgtaagacacaaacagaagacagaagacaaaacagtaaattttgaaaaagagcatgttacaatagggctagaccatgatctgtcttttgggaatcaagtgggaaataaattaaatatttcaaatctattttcgatgcatttttctgatgccagtgattttatgtatttttcatcgtcttagtccccttgtgctgcgataacagaaaaacatagactgggtaatgtatgaagagcagaaatgtatttctcatggttcaagaggctaggaagatcaagataaaggcactgggaaggttggtgtctgatgacaactgctctctgcttcgaaaacagtgccatgaattctgtgtcctccagagggaggaacactgtcctcacatggcagaaggaaaagggcaaaaggggtagattctctttgttaagctctttattaagggtcacagctcttactgctaccaaattggcaacacctgaattttacaggagacaccttcaaacaccagcaccagctagtcgagttgtacagtcctatgtatttaaaaaataattaaacagattaaattattttggggtcacttattattactcatcatagttcaatgatatttttaaataatcagtttaattaaggaatgaattaggtaccacaaattttaccacgtctaaatgaacaatttaaggagtcttaatttaatttgacgaatttgactaaaggttatagtcatgtatccaacaccaaaatcatggtatggaggcttctcattcctccacaatttcctccatatccattttcagtccattttttctccctttcccttgctcctggcaaccagtgatctgatttctgtcaccatagctttctctcttccagaatttcatataaatggaatcatagggtacacacatttttgtctctggtttctttcactgagtgtaatgattctgagattcatccatttggttccctgtatcagtagttatgaactttttgttgctcaatggtcctccactgtgtggctttggcaccatttgtctatcttatcaccagctgactcaatggtcctccactctgtggctttggcaccatttgtctatcttgtcaccagctgatgggcatttgggttgtttccagtttggggctattatgaagaaagtcttacgaatgttccatcccaggtctttgtgtggaaatgtgtttttatttcactcgggtgaacacttaggggtggaattgttggatcacagaataggcacatactttttggtgaatgggtactccctcagcgaccttgtctctcctcacaactgggatggtggaagtcacctccaccagtcctacggcacgagctgcttgtgtttagacaaattaatggcgaccctcaaataaacacacacctcaattatttaactatttttggctacttacaaaatcagaaaagattcacagtaccagttttctttgttggtgaaaaagtggtctctccaagctcttccgtaccattttaaaaaaatttacctccttttaaaaattatttgttttatgttcaatgcacccattattcaattataagtatgaacacaaatttatcagtataggaagctcatttgtatctaagagcataatgaaatatatcatgattcaattagagtttatgatatttgtttagtacaggaagctcatttgtatctaagagcataatgaaatacaccatgattcaattagagtttatcatatttctttgcaaaagccaggtattgcctagtttagtctattaattttgagtacaatctgacttaataatctctgattagcaaacttgggaagctattgaatagttcgcacattgcccagttactgcattcattgagagtgtaccaagcaaaacataccacaaggtagcacgtctagtctgtgtatttattcactgtttgtatgcgaatatgtgtaacttaatgattgtcccttaggtcatatagagaaaaaaagttaaaaaattacttggctattgttcttgtagtttttgtaattacacttagtaaaacaatatgacttcaaaaatgtaaccctagtatcacaatttgaacacaaaatctttcttattcattcaaataaagaaaaaaatgtgtgtttctgtgattacacaatgatcttacttcctttgccatttctatcaggaaggaattgtccttcttgattatcaggtcaactgtcaaggaaccacagtgtttgtgttcaaggaacccttatttgacttaacaattgcccaagagtaatgaaattggcatattgttatcatcattctatttttttaaatattattttatttgagacagggtcttactctgttttccaggctgggagccatcatggctgactcactatgatctcaggctcctgggctcaagtgatctttcgacctcagcccctggagtggctgggacaacaggtacatgccaccacacccagataatgattttattttacttttgtagagacaggggtctcactatgttgaccagcctggttccaagtccctgggctcaagcaatcctcctgtcccagcatcccaaagcgccaccatgcttgtcctattttatcattagtcattgttgtgaatctcttactgtgtctagcctgtcaattaaactttatcaggagtatgtacgcatagagaaagcataatacatatggcttggtttcaggcatccactgggggacttagagcttatctccttgggacaagggaaactcctgtatgttgaaaatgccctgtcccagctgggcaaggtggctcacgcctgtaatcccagcactttgggaggctgaggtgcgtggatcacgaggtcaagagatccagaccatcgtggccaacatggtgaaaccctgtctctactaaaaatacaaaaattagctgggcgtggtggcacctgcctgtaatctcagctacttgggaggctgaggcaggagaaccgcttgaacccaggaggtggaggttgcagtgatctgagattgcgccactgcactctggcctgggagagagagcaagattcggtctcaaaaaaaaaaaaaaaaagaagaaagaaaaaaggaaaaaaaaggaaatgccctgtcccagcagcagggagcccagagagttttcattactcttctgttgttgttagtgcattctgccctgaagaaaaacatcaaagaaaatctggctaggttcggataccctttttctctctttttattcaatagacagcaaatttaaccaaggtaaatttcagcaccttgattcacgtatattgacattgaggtgaagaactatgacctgttagaataaaactgatcaaagatgaccacaaaagattttagtgtctaccatctctaaaaggtgagtaatggaatctgcattgtatttcccactagaataaaaggggttttatctcaagtaaaatgtgtctctgtgaacaaaaaagctgggtctatgtagaatcagaaagaattatttaaaaaaaatctgtgccaatctgaaaatattcttgataatctgtgaaaatgtaaaaaagcagaacagactattgcatgaattatacttggtaacgttttccaaatttgtattgtcctatccctaatactttcctttcaataacagtagatacaaaagcagagcatgtgaggagctgtattagaatcaggatttcattctcagtaatatacacactactcctaaacgttccatcctgcacatcacatgagttaaattatttcttgatcatcaatttttttaagtaccagaggttattttgttccgtaggttacgtatcagacagtgatcatgagactcatagatacttggaactccccttttggatctaatttagctcgacttctctaactttgcttttttattaaaaaataggaacatcacttttcaaatcaattaatggaaaaggaagctggagactgtccacctgctctttccctcaattgcctcctctcctccttcaatgtcatcttaagtgacttctccttattaaacaccaggacagatgaagatacaaggcaatataattttttatttatgtttttatttcttgacactgccactttcaaggtgagatgccataattaactttttaaaaacttgtcaacttactttatttttcttacattacaaaccactaagtcaaattattgtgctaaactttatagtttactaaaatgtaggcctgacataaactaattggtgctaagttatatttaatgggttgtgcccagttagtttcctcatgttccaaatcactggatgtattagtccatatttgtactactataaggaactgctcaagactgggtagtttataaaggaaagaggtttaattgactcacagttcagctggggaggcctcaggaaacttacaatcgtggtggaaggtaaaggggaagcaaagtgccttcttcacaaggcggcatgaaggagaggaatgcagggggaattaccaaacacttataaaaccaacacatctcatgagaactcactcactatcacgacagcagcatagtggaaaccatccccatgattcgatcactctacttggcctctcctttgacacaagaagattatggggatcatagggactaaaaatcaagatgagattttgggtgcagactcagccaaactatatcactgaataagcataacaagaactggtcagattttattttgctttgagattttcaaggccagcctacttcatcgcaaaccacaaaatgacacaaataaaatcagaagtgcaaactgaagtcctggaaatgaatcagtactgatttttcttcaagtcaaaacttctcataaaaagatggtccctgtctcctatttaataataactaatcataaaaatttaacaatatgtaatgattccacaattcctatatatatatttttgaaacctttaaaatgaagattttcacagtcaaatgatgaaaatatttaataaggatgaagtaaaaagaaccttcttcatcaatataggtgtatggaaataatcatatttcaaatctatgagatatgaaacaatctatttgaccatactctgcaaatctagtgttcatagagtgatcccacaaaaataatgatatttattaaacttctgttaactcactttatcccttttatcaactttttttcaaattccatggaaatgtaaaagtaactatttaatttaatcaggctaataataacctatcttaatgaaattcagagaggaaacaagagactactttaaaaaccctctctagaggaccaattgcttccagcagaggaggcgtatgcctgtcaaatcgattactgtcaatgtgtaatgttagcatcagtttatgagctcaactgataattcacagggctgacaagcgcccttgcagaatcaggaattaataaggtaaaggaattttgaattttagaaaatggaattaagccttaattccatgaagaacatagtaactttgtcaaattgcattatctgcttcgttgcgtctaccattacttatatctgaaggtaattacaaaatagctattattcttacagcacctgaaatttgaaattaaatagatgttaaattattatataggttttagaagttctaatttcaactatatggttggggacctaaaagtgatatgtgagctacgtagaatgaatttccttgactgttaaacactcgaggaaggggggaccttaaaagtcactttagaaaacaaacaaacggctctgcagccagaactgcttccttattcagagacgaatggccaggcctcaagagaagcataactcttgcagcttatgccaatattcaaattacagtacaaatcttgacagaagctgggctttaaagaaatggcacgagaaacgaaactgtcaagaatattaaatcaccccaaactgtttatactgagcatattttaccaaagaaggtattcaaataaaaatgatggggaaaaaaaagactttcatagcaacccttaaaagactgaccataccaaatgtcagcaaacatttagaaaaactgtgtgtaagagttcaccgttagtgagggtggaacttagtacagccaccatggaaaacagtatgcagctttcttataaaagtaaaaaagaactatcatatgatccagtcatcctactagtgggcatatacccaacagaaatgaaatcagtacatggaagagatagctgcactcccctgttcactgcagaatcattcacaatagccaagatacggaaagaaccgaggtgtcaatcaatggatgaataatggtaaaaatgtggaatactatttggtcataaaaaagaaagaaatcctgtcatttgcagcaacacggatgagcctgaaggacactttgttaagtaaagtgagccagtgacagaaagacaagcacatcatcatctcacttttacggagaacctcagaaaactgatctcattggagcagaggatggaatggtggttaccagagactgggggaggcaggaggacaggaatggggagagatgagttaacaggtgcagggtctcaggtagaagtaagaagttcttgtgtgctattgtacagaagggtgattacacttaacaatattgcatggtatatttcaaaatagctagaagagaggattttcaatgtttttaccgtaaagaaacgctgaacgttggagatgatgcaaatgctacgaaccttgatttgaccatttcacaatgtaaatatgtactgaagcataaataaacagaaatgataataaaatgctgaaggaaatataaaatgcaaaaattattttgggaaacaatttggtaactttttaaaaagttaaacatgtagttaatatatgacatggcccttccacacagaggtagtgacccaagggaaatggaagccatgtccaaagcaacacttgtacacagatgttcactgaccttcattcttaaacgcccctgcagggaaaaaggcatgaagacactttgggggctgtcaggaacgttcaatatctttcactatgaggtattcgcactctgggaggggtcaacaatgttcaatatcttgacgaggggtggtgaaaacaagggttgatgtttatcaaaactcatcgaattgcacacttttgaatatctgcatttcttgtgcataaagtataacttaatgaaatggttaaattgttaggtttttcagcgtaaaattttctatgaaataaagtctatggttgttgttttctatggtttgtaatttataccttacctataataaattacagatagtcccacctcccccacaaaaatacatccacagcaacagccagcactactgagtttggtcacataaactgtgcaccagatcacaccaggggcactggccacactgtctatttcttatatttgtcaatctcgatatgtattaatcgatatctgtatgtatgtatgtatgtatgtgtgtatgggtatacatgtacaaatttaattataaaagaggataaatcagaacaaaaatataattgccaagtatgtatatatacacacatgcatatatacatatatacacacatgcacatatacatatatacacacatacatatacatacaaacatatgaatatacacacaactatactgggaattctaatatctcatcttccctctttgatacatcttccactgatatgtaggactatctgctataagggagatgttattacatcattattatcaatatgaatacttacaggtgacatttaataactgcttactatgtgctgagaaatgtagaaatcattttgtatgtgttgtatagattttaaactagattataaacaccatgagagtggaagctgtatctgtcttctgtttatttttttaatgctgaacaaattgtctgacatatgtagtaggtatttaattaatgtttatcaagtagatgatggttatgaagtccctttatttcatcattacaacatgttaaagcatttttctgctaggcacagtggcttacaactgtaatctcagcaccttgggaagctgaagcgggtggatcatttgaggtcaggagtttgagaccagcctgtccaaaatggtgaaaccacatctccactaaaaatacaaaaagtagccaggtgtgatggcaggtgcctgtaatcccagctactcaggaggctgaggcaagaggatcacctgaaccctggaggtggaggttgcagtgagcagcgatcatggccctgaactgcagcctgggtaacagaacgagactccatttcaacaacaacaacaaaaaaattcaaagaagctctttgtaaatatataagataggttctattgtttaccttattttacagataaaataattgaagaaaattggataatattctaagcattgaatagttgcatgactagtaaactggagggttcagttcggtcttttctcactgcattgtctgagcccttaaatctctcttcttggttttagttccttagcaagatcaggaaccctgctagtaatggattctgggaaatgcagtttccaggcttccagactttctgttctagacagtaaggagcccatgagaaaatgaatatggttaaaacaccaacagagctagcaactctatggactctctatggaagagggatgatggagattaggatttcccagttccactaagacacaggtccatgcaacagctgaaactccccatccctcaccttccctcccatgtgcagatgtcacacctgggccatcactaatcttgtctaaccctgcatactctcctctgctctacagaaaggcagtaacttggagagtgaaaattttcccatctcattttcccactaggcagttgctttagtgtgccgcttttgtattcccagtttgtcttttcccggaagtcagcatgtcactttcagttttaaaaggctatttaactggtattcatcttgccgcctccctgacccatcccatccccatgccttttttccagtagtgcatgcctctcttccatcccttgtatgagagttaaattatactttacttgaattttcttctatctctacttgatttacctcatttccaccaataaacaactgacaaaacttgtttattaatgttctcccttcatgtttccggtaacatatgacccatagtcttgctaaaattaagaggaaacacatcacatctctcactttacttttgctctatctacaacgataacttgttcaatgactttgaaaatttgctcctatttattcataacattggagaaaacaaatattttattccatacaattgtcatttcctaccagcctgccaccacgcccacagtgagataagatatcggctgctcttctgcagcacctcttacttcctgccttgacatgactttactgtgtcacacttctttcaaatgttagtagatgcttgatagtatcacagactcgaatgtgatcatgtaagagatcactgtgtgaattccatgttctgctaaatttttgaagttcctactctgaaaattataacataataatagggtctgaggaaaagtcccagaacccagttggtagttatcaaccaacaacttaccagaaagatgactcagtagattgcttggtaatacctgaacttcttaatctgggcattataatcaggaagaggcatgggtagagaactgaatatgactatggaaaaataaaacaccttttaaataaatagatttttaaataaaatatttgggattgagaaactatgcaaatgaaagatagacggttaaaagaaaaaaaatcatttaaagtgtttactccttagcattgtcaagtgatgaaatgtatttataccacgacagttcctgcttagcttttgcaggtaatggttgccaagtctttggtgcaaaaatagaaatgataatttttagaaaagttgttactccttcccattactgaaagttaaaaattgttttcaatatgggcttttttttttttttttttttgagatggagtctcactttgtcaccaggctggagtgcagtggtgcgatcttggctcactgcaacctcaacttctgcctcccgggatcaagagattctcctgcctcagcttcctgagtagctgggactacaggcgtgtgccaccacacccagctaatttttgtatttttagtacagatggggtttcaccatgttggccaggatggtcttgctctcttgacctcgtgatcttcccaccttggcctcccaaagtcctgggattacaggcatgagccactacacatggccaacatgggcttatttttattctacattgtttatgtgaaatggatctgcttaaatatagtcatcagagtaatgcctaaacacacagacacacacagttacatttcttctaatcattgaagaacataccttatcaataaatgggggggttacagtcaggttcttccagtagcagatggcatacaaaattcagtttaagatgtgcaaacaagtcattgaaaaaataaatttacttgaaaactgtgtcatagcaacctagtttttaaaagttataatccaagaaatacgttttatacagagattggaaggttagaaagttgcattttgataaacatggtgggattctgaagaaacaatgaatgaaatagaaataaactttattagacaacttttgtggaactacagttgttgacatagagatgtagttacttttctgtttcttcaaaattcttctaacttatctccaggtcttctgaccatatagctttattttgatttccttgacagggacttccactgcctgactgtttttctgcaaatattttcaatgagaatcccttctgcctttcaaaatgggcattaagtgaactacccactttcttaatatcccctttgctcctaaattaaatattttattttttctttatttgtggttggtgttgtgtggtgtgggcggattgcttcttggttcatttttcaagatctccttattatgtaatgaccatggttctttcggacagtctaaattattttctcattaaagccatgcacacgtgccacactctagtgctgacgagggcatcttctttatgtcttggcccatcagatggccatttagcgcccaacattggtgagatgcttctctcttagtggaaagtgacagaatgcctgcaaccccatattcttattttctaatctgaagttaaattcaggcttgtgttgacttttatttccctacgtaagacttcagagcagattcaccagtgcacagttctaggactgaaaaacgggctcccgtggcagctcagccattctctgttgcactggaaattgcttcctgcttcaacttctggttaagtcagctagaaagttccctggactaaggtgctcaaccctgcaaaatctcagatggctcccaggcaagactcccctctggaagtctaacgatttccttttaggtggcaaagcactgagtgatttctctgctttctcatgaactacaacaatcgcatcattcctggcattctttgattatgagacctgaggtcttagtagcatctgatgctttccagagtaaccttagaattatataagaatacctttgaggttctctggcagtaaatgtttagataaggccatcatagtaaatattccttagaacatttcccatttatgccagcgtcctttcagaatattacctctgtaaggtacgactaaatcgttttttaaaactgtgtttcattttcaggttgatataatctctaatgcaaaactcatctaattaccagtagatgttcctatatgtaataccaaaattaaagatcaaggtgattttatgacttttccatttaatttcttctgagcatttgtaaagagttccagttaattcaatatttgcttattccatacaagcctatattaaagaaaatagtatccctgacagttaatatgtgttttcactgcattttgttatagacagttcaaaaatgttctgccttgattatgaagtacaaatatttccttctaaatagtgaacataatttagattatattacttctccagcctaaaatcatgaggaaatcccatttattagtgttaaatctcaacctaattgtttgatctgatctctccaccttttctccatatccccctcattcctgccccatagacttcattttgctgctgaataaaatcactaatttaacatccgcagatagcttgtctgctcccatcttgtattcatctcctggaacagacagttccttacacttctcgcctatatttctatgagtcagagtgctggcaggaagtggcacactcaaatcggaaaattaaaaaaagttaatgcaggaaatatcgggaatacttgtgattggtttaagtcaactatcacgggctagtcagcacagttcccatgtgctgttcacagtggatccatttatccccccagggagctggtagcagacaggacagggagctggtagcagacaggactgggagctggtagcagagaggacagaagcccctggtgggagctgctacctttggcaatccatggaagagagacggagagacagcacacccctacttcactcactctgtggcctcagtcactcccctttggtgaatcccaatgagaagtcagagggcaaaaaagccccttgatatgttcagtcctcagagcacagagctccctgggaaagaaaatagtatccctgacagttaatatgtgttttcactgcacatatttcactgcacatatttcactgggaaagatgaagcatggggcagaggggctgaaacagatgccctgagtggttcttctccatcagcccagccacccagtcccgccacctctctggagacctcatagaaatgcctgaaacatcacctgtggatgcctattgaacacatcccactcttagaccaccacattctgtccaatcctttcaggcttttgggcattcctgaagcccactctgtccacctctccactctgtccacctctccgcctgcatggagacttcgaatcagcacatctcgtcatgtctgtcttctaaccacacctccaacctagcgaccttgatgactatgagctgttacatgaggcaactcctctcacctgcacggtgccacccaccttccgtcctacctcctgccttcacccagacctccttcccatcccaacaccctacacgtcactcaatcaggttcttcctcgaacaatgtgtgtcaggtcaggcaactgccctgcacaaaacttccatggcttctgattgcagagtgacaagagaaacatggcagggggctgatgccttgattcctcctgactttgcttctgccccactggaaagatcttccccttggatgagtcttcccctatagcttagtctggtcttcctgcaattaaccagatgcaatccatgccatttcactttgcaactttgtatttgcaaatgctctcttctgggacacatcccagctacccaggtgggcagctccccactcccttcaccagcactcccttccagagactcacactgctggttccaccctaaggagcagaggctccctcactctccagccctctgaccattcccctacatttttctttattgaatttattaccacctgggagaacatcaaggctaagataccatcattataagatgcttaattacttcatacactattgaaaaagaaaattaaaatgtgacatgagtctctcttaccaacgcgatagtaagatacatcccatatcagaggtacaaaaaggtgagaaagtccatgccttagaagccatgagacaggttatatattactattattgttattattttcactgcaaaactgtctgattagaatgtaaaatctgtgagagctggtcttttgcccagttgctacttacgtaatcccagccctcaaaatagtgcctggcacacaatattcagtgaatatgcataaaattaattatgtaaattaagtgtaatgtttagtggctttaactatatcattgtttcattttcttttctaccttctatatcttataaatcttacgtatgttttattattgatcataataaacatcacaccaacatagtgattacatgtatttcaaaacaagaaaagtgtgagtcttgtattgttctatatacgcgacaccttagaaacgctttctgagtaaaaggcagtcttttcaacacattggcaatgagcatttttaggagtaaggcttaaaaaaagatattttcttcttctcttctcaaaacaaacactgtccatggctatagatttttgtcagtatgctaatatgttatgattcgggattattagagatgaaaacattaaggtaatgccaattattattttctcagccactttatgtatggcttctccaaaaaaaagagtgtgaagctaaaaaaaagagagaaaaaagcatgcaagaagcagacagggacttaaacaagacagcttgaaaacctggcttattgctcatttaaagtgtggagcttaattcttatctctggctatggttctcatgcatcgaaaaacttcaaagactgaagtgcaaactcattttctttgcttgatcctcctggtagggagggaaaaaaatcaaatgcaattgtgtgaatttatcataatactgttcaaggggaaaactcataaaaatcctgtctgttgctcacttgatttgatgtatccttgtctaataccaccattcactgaagacaacacaggcatcccaaatgacggagcggctctcaacacgtcaaccccactccattattattggcctcaactcgggaaatcttatctatgaggtatagtttgcattcatataaaaccctctttggcaattcatacagttctgacttatcctaaaggctgaattaaatgggctgtgtaatttgtaaacagaattcacatttattctaatgggacagcgggaaataagatcaacactggcagcttctccagccctgctcaaagaaacttcaacagaggccaacgtatccagggaaaaactggactgcaggagcccatcctcaatgaatgttatttatccttcagagtagattctcttctttacatagaagatggttgtgattataatttattattaacattaatgttttccctttctaatcacagtcaaaaggaagacagaacaccctgttcccaccaaagccactatagatgcagctaattgatatcttttctttttttttttgtttcagagtcttgctctgttgcccaggctggagtgcagtggcacaatctcggctcactgcaacctcagcctcctgtgttcaagcaattctcttgtttcagccacccgagtagctgggattacaggtgtgtgtcaccaggcctggctaattctttagtagagacagggtttcatcatgttggccaggctcatctcgaactgctgacctcagatgatccgctcacctcagcctcccaaagtactgatacctatttctaaaatagaggtttttgtacaaataagaattaagtatccatagaatttacccagtagaaaagcttcagacttagctattaaaattatttgaatattcaggtccatctgtgatttggtaaataattaccatggggttttattatttttaacaaatttttgaattttgagataattatagatccatatgcagttgtaagaggtaatacaaagttctcatgtaagttttaggcagttacaaagatcttgtgtaaccttcgtgcagctttccccaatggcagaattttgcaaaactgtattataacatcaccaccagtatactgacgttgaaacaggtgagatacagaacatgtccagcaacacagacatccctcccgttgacccttgatagctacacttactttggcccatcaacacctccctccttaactcctggccactactaatctcttctctcttcctataagaatgttgtagaaatgcatgtgaccttctgggattgacttttttggtcagcaccactctctggagagtcatcaagttggtgcttgtatcaatagtttattcctttttattgctgagtgggatttcatggtctagatgaattaatttgtttaactgtttgcatcttcaatgacatttgggtgatttcctgtctttgactattatgactaaagctgctacacatattcctgctactattacttattattatgttatgtgaacagaagccttcacttctctgagataaatgattggaagtgcaattgtcgggtcatatgataattgcatgtttagctcttataagaaattgctggccaggtgtggtggcttgcacctgtaatcccagcactttgggaggccaaggcaggtggatcacctgaggttaggagttcaagatgagtctggccaacctggtgaaacctcatctctactaaaaatacaaaattagccgggcatggtagtgggcacctgtaatcccaaatcccagctacccaggaggctgaggcagggagaattgcttcaatctgggaggtggaggttgcagtgagccaagatcgtgccactgcactccagcctgggtgacagagcaagactccatctcaaaaaaaaaaaaaaaaaaaaaaaaaaaaaaccaagaaaaaaaaaagaaaaagaaaaaaattgccaaactgtttaaaaatgtggctgtaccattacacattcccatcagcaatgtttgagtgactcaacttctctatttgagagcatttggcaatgtcagtatatatatatatatatatatatatatatttttttttttaatatgtatttttaattttggacattttgatagctgtgtataatagctcatttttgtcttaaatttccctgatagctaaaggtgttacacagtgttctatgtgtttatggtacatgttctttggtgaaaggtcttctgaacatatcctaactctgtgactctgtgtgtgtatctgtgtgtgtgtgtctgtgtgtgtgtgtgtaattgtagagtcttaagagttctttatgagttcttatcagatacgtggtttgaaaatgttatcttccagtctacagcttatcttttcaagttctttatatgatttttctccgagatgtttttcattttgataaggtaataatcaattatttggtaaataattccaattgatgaattatgttttgggggacaagtctaagaaatatttgcctagtctcagattgcaaatatttcctcatatcttttactaaaacttttatatgtttacatttacatttaagtctattatccattttgagtagatttttgtaaaagatgtgagattcacatggaggcacatttttggcctatgtatgtccagttgtcctggagccattcactgaaaagactattcttcctccattgaattgctttggcccctttaccaaaaaccaggagggcatcttctgtgggtttattcctgggctttctattccattccattaatctctgtgtctgcccttccaccaacaccacatggtcttgattactggagctatataatatgcagtgaaattgggtaaggtgcttttcccactcaattttgttcttcaaaattactttagctattccagttcctctacattttcatacacattttagaataatcttgttcatatctacaaaacatatttgctgagattcttataacaggtgcattaaactgtatatcaatttgggagatttgagatctttactctgagtgtcccaatacatgaacatactatatctctctacttattttgatctttggtttctttcaatagcattgtatagttttcagtctatgagtcctatacatatacagttttctttagatttccacatattacattgttttgagtgattataaattgtattttaaagaaattgggtgttcacgtgttcatattattatatagaaatacagtagattttgttgttgttgttcatcctgtatcctgtgaagtcaccaaactgggttcttggctctaagagtttatctgtgaattctttgggaaattctatctagacgatcacgttacttgcaagtagagtcaggtttactgtttttctttgcaatctgtatgccctgtttctcttatccttgcaattttgaatggacttgagcttccagcactatactgaatgggaagagtggatatccttggtgggttcttactcttagggggtaacatccagtctttcatcagtaaggttaattctaagtgtttttttgttttgttttgttgttttgtaagtgctctttatcacaaactgaggacgacccatttcctcctgccttgctgagacgttgtcatgaacagacgttacagcaggcttgatggtggcccccgataacgacatgtccactcccttgtccccagacgtggtgactgtgattttatttggaaaatgggtctttgcagatggaatgtagttaaacatcctgagattagatcatcctggattatgttggtgtccccacatccaaaatacgaatgcctttgtatgaaacacatagaggagaaaacagacaccaagagaaacatgtgatatgaagacagaggtaggagttccagcggtgccactgttagctgaggagcataggagacactgtaagctgtaaaaggctgggaatggtttctctccccgggagatctggcagggagcatggctttgctgacaccttgattttggacttgtggcctccagagctttgagagactgaatttgtattgttttcaaacagtacatttgtggtggttagtttccttaggaaactaataggggtgttgaatttgtcaaatgctttttgtgcatcgactgatataaacatgtgatttttcttctttatcctgttaatttaataaatgacattgattttgaaatattgaacagtctttcattcctacaaggaaaacacttcatttgcttatggcatataatttcatatatatatatatatatacacacacacacacaaaatcctgtaccacgtaaggacatttcaatcaatgatggatcatgtatacaatggtcccataagattataatgtagttaaaaacctcctatcacctaatgacatagtagccattgatcatagcacaatgcattgcgcatgtgttcctggtgatgctggtgtaaataaacctactgtgctgccagccatgtgaaagcggagcagtgcaactgtacacagcaggtaacacttgataataataagtgactatgacattgctttatatatttactatgctatactatccatcactgttttagactatgctccttatacttacattaaaaaaaaatcactgtaaacagccttaggcaggtccgtcaggaggtatccagaagaaggcattgagatcactgaacatgagagcttcattcatgtgtggtattgccccgaagactttccagtgggacaagatgtggaggcggaagacagtgtgtaggcctaagctatgttttgtgtgtttgtgtattagttttaaacaaaaattttaaacaaaaaattttaaaaagtaaaaaaaaaaatacaaaattaaaataaaaaatgtttacagaagaagactataaaaatatttttgtgcaactgtacaatgtgttttaggctaaatgttatagcaaaacaataaaaaattttaaaaaatgaaaaggtttataaagtaaaaaagttacagtaagctaaggttaatttattattgaagaaataaattttataaataaatgtactgtagcctaagttcacagtgtttataagtctacagcagtgtatggtaatgtcctaggccttcaatttcagccatcactcactcactgactcacccagaacaacttcccatcctgcaagctctattcatggtaagtaccttatacagatgtcccacttttttatctcttatacagtgtttttactgtaccttttgtatgtttacatatgttcgatacacaaatgttacttcttgttacaattgcctgtagtattacagtcacatgctgtacaggtttggagcctaggaacaataggctgtaccatatatcccaggtgggtagcaggctatacaatctgggtttgtgtaagtgcactccacgatgtttgcatactgttgaaatcatctaacaacacatctcagaacgtatccctgttgttgttaagcaatgcatgactgcatatgcatgtatatatacacacacatacacacgtacatatatatttgaattctatttgctaccattaagaatttttgtgtctatatttatgagagatattagtacatagattttttttttgttatgtctgtacctggttttggcctcagaatattataacttcacacattacttgtgaagtattcccccatctattttctgagtatgtgtagaattgctgtcaatttttctttaaacatggttttattaatttaaatcattaaaattgtcctctttctataggaacttgcatatttctgtttaaaatgataattacaatgaatatgagtttgtatatgtgactaattatcaaatcaaggccatggacttgcatttgtacttatgatgccttttctagcagacatccactagtgagcagtgtacactgcacaccacgtgtcaccttctgctgcaaaaaaatgtgagaggatacacgcacaaggctattcatgtcagactatttcttatagcaaagaactggaaagagctcatcaatagatgggttggaagactgattgaataaactgtggcctctccatctactctgtggagtgctgtacagccagagaaagaggagagagagagaaagagaaagagagcaagctactatagaatgagctccagaattcattagatagaaaaaaaatagagcctaaaacacattactgcttacccaatttgggaggcgggttgacacaaacatctaatatctatatatagagatatctacatatgtgtgcgtctgtttcttaaaagcaagaatgaaccagaacaattctacaaattagtatttacagggggaaagtgaaacagtttagaagagaaggaagcagaagtgagaccttcaaattatacctacctttgcagagttgactgtggaatatcaaagtatgcaaatctttgtatatcacaataaaacaaaattattttaaagcaatctaaaatgtttaaagaagtaaatctaattgtgaatctagcaatggacagctttaaaggaccttgaaatacagtaatttgattgggagacatgaagtgtaaacatgaatgcaaaaccattttagattgttttcagcactactgatgcatatggaaatgttggtattgctttcaaatttttcacgtctgtgttgtaagatacagcaactgagaaattatgagatattctaattccacctttatcagagttactgagagcggggacactgggtgaggaaaggactacagatatacaatggaagacatgagaaaaaaccttgcagtgctgaatgtgaatcaggcgtatcagcatgaaatcttgtctctttgttctatacacacacacacgcacatacacactcactccctatcgagtgaaagggcccagaaagaacaagaaatcaagcagtgattaatattgtaagtgtccagatcataatgttgaaatatcatttgccattcaaggaagccaagaatcactgggctggatgactaatttcaggtttgaagcagaaattacacaagataaatttggaatggtttatcccactggatggcaaagaagctatcatcgactcaggagtcaagaacacactaaaaggcaaaattagcacaattttagcatcaacaaagataatacattccatagattgaaaatcatcagactgttttaaattcatgagttctttcctaacaatacaaaacaataaaagaaattactgtagagcagtagtgctcaaccagtagaacttttgctaccatcttctctcccctcattgggacatttggcaatgtctggaggcattggtatttgcacactgagggtgaggatgctactggtatctggtgggtcaaggccaatgatgctcctaaaaacctacagtcacaggaccgtccctgccttaacacccaaacaaaagtatgcagtggaaatggtgataggcctgaggctgaggaggctatgaaaacttcctattctgaatgtaatatataaatgtaatgtaataaactgaaaaggccacatttatcctgtcttgcctatcaactttgccaccagacaaccaaataatatgcttcttttataggagaacctcagcaagtaaatacaaaaagaagcaacagaatcagaatactatcgatttgtggcatttagtcaataaacacagctggtcagtgcacgtcagtcaccccgtctcctgatgggagaaaacaccactagctatgaagtcctcatgtcagaaaaactcaaactcgaacctgtccaagcctctttatccagtgccaagtcacagaaactttcttaaacactctggagatgcaatcggcaaaatgtctactatggcaaattcaacagggaaaaagaaaaacagaaaataggagcaacatataaactaatatacttacaacctacatcaaacaatcacaatcataacacagtacacttttaataattcttttatcacctcatcatgaaggaaaaggaagccattttcagtagtctgggttacgttctctgggtttcactggtggaagaagaagttataattttggggacgtcactaaggtaagggtactaatatatcctgggtacctatcacattctgcagattgacgtgtatacatatatgttaccatcttattttcacaaacactcaagaggcagatatgactgtgcctacttgcagatagttctcagaaagagaaagtgaattacaaagtgaggtcaacttaaacacacagctcgagcagatggaaccaagcctctatagctgcaatgtgcacaactcttttcattacacatttttttttaatagaacagacttcttatgaaagtgcggatgatgaatcagtgcatcacagaccacaataaagaaggccagaagagaggccattcacttgggagacagctgtaataaccaaggtagaaatacgtcggaactagaggggacgagaggaaacaaggccatgtagcaaatgaggagttctgatttattcgaataaagtccacaagaacaagaacaaagccatgtaaacagtaagaggataaaactttgagaaaagacaaaacataacacccaaaggcaactgagggattatatccttgaaagaaagagtataattcaagatggtatgttatagaaatagcaaaagcgtaaaattgagatctatcatcttgactccaaagaagattgtacagagagacagagaggcaacgatgaaatgactgcttgttctgggcacaacagagggagaagggaatgtaatggaaagtcaaaaatactgtcccgggcccggattgataattacatttttgacaagaaggtgaacagtctggaaagataacagtaaagttgaaatggactaaaaactaatttgagaagtttgttgtaatagaattgactgcaagaaaggaaattgccatggccccagggagaaaaagaaaagaggatgagggagaaaaaaatcgtgaatgcactttctgaagcactcctagtccttggaagagggacagactctcagaaatcggaaacgtgtgctgcatgggctattgtaaaattagttttctttaccttttcagatcattttccatcaggcaagtcacaaatttacatagactgtttgcaaaatacacaaatgtaaatatggctttcaactgaggatctgtcctctctgttttaatacaatgtatcctgacaaaaactcagttatgattcctactttgtagataatgaaactgatgatcagagaattaattactgagtagttcatggtcatgctagaaacaaaaagcaaactcaaggatagagtgcaggtagtgacaggataaaccacagcttcctctccacgggtaaacagattctcctaacaaaggtttcactctgtgtagacaaaagaaacgctgtttggggaatctagttaggaaaaaaatctggtaaaaagtaaaaggtaaataggaacacatgccattcttgaaaactattttacttataaagtgcaaaaatgcataggatgaggttatctagacttcggaatcctgacgtcgatgaaatggaacctgttggaaatataaatatgtatgggtggtgctcaagttattatttttgacttctagctggtttcattagcatttctttttctaactttaagaacttgtaagagaaattaaagcactaattgagttgggggaagaaaggaaataattagcatgttgtctgctcacacatagtgacttgttaacaaaggagttgaagatgtaaagaataaaggaattggtgaaatgttatttcattttcaggaagacagaaaattcttaataaaattaaaacacagcgtaacatcagttgttatattttgagtacctcattaataaaaggattaagaaaacatcaaaagcacaacagacatgatcaaagagccacgggcactgatgaaaagatgaaaagaactctatggcaaagaaaaatgatgaaccagcatgcgtctgcatctatcaaacacaaattaacagaaaatagcagcacacttttttatgacacaatttcaatagaattaaatattttaatgaaataaaaatcctaattcagtttagcagtggagatcagtaactgagtctcagaaaaagggaaaggaatgaataaaagaagaaaaaaaaagatggcttaggttttacccaaagataaaccactttaggaggtatttttagataaagtggaaaatgaaaagtatttagggtaagagcgatgcatattgcagaggaatgggaagtgcaggcagtgtactttgtgcggctggtgtgggacaggtggcacccggaaccactgttcacagagggcgacaggaagggtcagaggttccgtaggattagcccctgcacatgtgatcatttggcttcttttaaagcagtgtgtgcattctttgctgctttatttctcctggttggaagggctctgctcccacttcctgggggtttgcttcagccctgttgcagggatggacaggtcacttggagtggccagtcaggttctccgtgttcctggatgtggcagtggatggagggtgcagaattgagcaggaccacttggggccatttttgggtttgagatggaggccatcggaggtgtctttactcttcgttcctcaaggccatgaactgtaagagcaatgtaaccccagaggagctggaagctattttctctgtcatttacagacaccccacatgggacagagcctcaagaaaagaaagcagagctgaggaaatgagagtcctgataccactgggacctcctaaccctggatacaaacaagcctcttgtgtcatacacaggatttctaataacagagatataatcctaaaaataagatagaagggtaagagaatattagcatgatgctgtcaatccaagtgagggatacagggagcctgaattgggggagtagatagtgaagacagaacaaataaaaagcctgtctgtgtttcctgatggggccaactctcaaaagggagaagaggattgatctcaagaccatccttggacaaaagagggacacacatctttctgaaactggtgggaaggaaggaaggaaggaagggagcaagggagggagggagggaggaaggaagaaggaagaagggaggaagggagggggaggagggaggaggaagggaaggaaggaaggaaggaagggaaggaagaaggagcaatgaagatgactgtggaggagcaaagaagagatgttcttgctgtacaaaaaaggtgactttttccctgaaaacttggagagaggctgctgtgggtttattaatgaaggtttaaagaaaagtgaaggtttgtaggagttgctgtaagtccatgagtactaataaaaggaccacatgccatgcaaaggtgagagtgtggggcaaggagcggggcagcatgagtggaggccaagtgggcatgacccatgaccttcaggaactgcagcatcgagagtcctctaggctgagctcactcctgcacaccacagagggatgcattacagagaaaagctttagacacttcaggcaatagtgagtgacttattctcagttatatgtctaaatgacacaacttcatggataattgtctccactctccactaattttggaaaacttacgcaggcataattctattccagaagaagcacctccctatgtatgaatgagccaccttcccccaagagtaaatgtaggaaagaaggtgacagccaatcgcaatggatgtaaacaatcacatataaacagaaatcaaacacgtattagtaggaggcagaaaagtttacttcaaaggaaatgggaaaggatcacatgaaaacttgttgcctgtcttccaatccatgagttctacacagcacaaagcaacatgcaaagcacttgtaatacacttaatctttgagtttgcgtcttgaaattagttggtggggggaatcagttcttaaattatttgcatcaaaatagcataaacctgaagaattgtagagggaagttaaaattaaacaggcttattctgaaaaatatctgagagactaaactcagcttctttgcttttaaaaatgtgaatccaaatcagcacaaactcaatataatcttgttttctctacccctctgttatgtgacaatgtctcatgggttggctttgccaagtcagaggaaaccccaggctcccaccatgcctaaggatgtcctggactcggaaagtgaattttttcttatgctatattttctctgtggtgaagaacaaaatgaacatacctctcatgacagcaattttttttttttttaagatggagtttctctcttgttgcccaggctggagtgcaatggcacaatattggctcactgcaaactctgcctcttgggttcaagcaatactcctgcctcagcctcccaagtagctgagattacaggtgactgcaaccatgcctggctaatttttgtatttttagtagagacagggtttcaccatgttggtcaggcctgtctcaaactcttgacctcaggtgatcctcccaccttggcctcccaaagtgccagcattacaggcatgagccactgcacctagccgagagcaacatttatatccatataaattcatgtaaagttttaagcctcacgttgtaaagtttctaattatttcagacatttaaacattaggacatttaagaaaaactattgctccagtcttaagactcacacagcttgccataatcaagcgttttaaagtggaaaagccagacgggagagagggtcaccagctcctcctcatcgatgtggtcctcaggagcctctccttccctggttgagacacatacgaaattcggaaaatcatctggtttgctgactgtttcactttcatgtatgtgtcctgcacatcaggatttgcttcgatgacgaacgttgactgtgggtctcttacactcaggcggcctccagcctctgataagatgggccttaacatctccgttgaccaactgacttcatggtctttctctgtcatgacctaatcaggagtttcagatcttcctacccatacacatggttgcatacaagcctctcctatttttttttttattatgctttcagttttagggtacatgttcacaacgtgcaggtttgttacatatgtatacatgtgccatgttggtgtgctgcacccattaactcgtcatttagcattaggtatatctcctaaagctatccctcccccctccccacaccccacaacaggccctggtgtgtgatgttccccttcctgtgtccatgtgttctcattgttcaattcccacctatcaatgagaacatgcagtgtttgttttttttttgtctttgtgatagtttcctgagaatcatggtttccagcttcatccatgtccctataaaggacatgaactcatcatttttcatggctgcgtagtattccatggtgtatatgtgccgcattttcttaatccagtctatcattgttggacatttgggttggttccaagtctttgctattgtgaatagtgccacagtaaacatacgtgtgcatgtgtctttatagcagcatgatttataatcctttgggtatatacccagtaatgggatggctgggtcaaatggtaattctagttctagatccctgaggaatcgccacactgacttccacaatggttgaactagtttacagtctcaccaacagtgtaaaagtgttcctatttcaccacatcctctccagcacctgttgtttcctgactttctaatgactgccattctaactggtgtgagatggtgtctcattgtggttttgatttgcatttctctgatggccagtgatgacgagcattttttcacgtctcttttggctgcataaatgtcttcttttgagaagtgtctgttcatatccttcgcccactttttgatggggttgcttgttttcttcttgtaaatttgtttgagttcattgtagattctggatattagccctttgtcagatgagtacattgcaaaacatttctgccactctgtaggatgcctgttcactctgatggtagtttcttttgctgcacagaagctctttagtttaattagatcccatgtgtcaattttggcttttgttgccattgcttttggtgttttagacatgaagtccttgcccatggctatgtcctgaatggtattgcctaggtgttcttctagggtttttatggttttagggctaacatttaagtgtccaattcatcttgaattaatttttgtataaggtgtaaggaagggattcagtttcgtctttctacatatagctagccagttttcccagcaccatttattaaatagggaatcctttccccatttcctgtttttgtcaggtttgtcaaagagcagatacttgtagatatatggcattatttctgagggctctgttctgttccattggtctatatctctgttttggaaccagtaccatgctgttttggttacggtagccttgtaatatagtttgaagtcaggtagcatgacgcctccagctttgttcttttggcttaggattgacttgtcgatgcgggctcttttttggttccatatgaactttaaagtagttttttccaattacgtgaagaaagtcattggtagcttgatggggatggcattgaatctataaattaccttgggcagtatggccattttcacgacattgattcttcctacccatgaacatggaatgttcttccatttgtttgtctcctcttttatttcattgagcagtggtttgtagttctcctcgaagaggtccttcacatcccttgtaagttggattcctaggtattttattctctttgaagcaattgtgaatgggagttcactcatgatttggctctctgtttgtctgttattgttttataagaatgcttgtgatttttgcacactgattttgtatcctgagactttgctaaagttgcttatcagcttaaggagattttgggctgagacaatggggttttctaaatatacaatcatgtcatctggaaaaagggacaatttgacttcctcttttcctaattgaataccctttatttccttctcctgcctgattgccctggccagaacatccaactctatgttgaatagcagtggtgagagagggcactcctgtcttgtgccagttttgaaagggaatgcttccagtttttgccccttcagtatgatattggctgtgggtttgtcatagataggttttattattttgacatacatcccatcaatacctaatttactgagagtttttagcatgaagtgttgttgaattttgtcaaaggccttttctgcatctattgagataatcatgtggtttttgtcattggttctgtttatatgctggattatgttaattgatttgggtatgttgaatcagccttgcatcccagggatgaaacccacttgatcatggtggataaggtttttgatgtgcttcttgatttggtgtgccagtattttattgaggatttttgcatcgatgttcatcagggatattggtctaaaattctctttttttgttgtgtctctgccaggctttggtatcaggatgatgttggcctcataaaatgagttagggaggattccctctttttctattgattggaatagtttcagaaggaatggtaccagctcctccttgtatctctggtagaattcggctgtgaatccatccgtttctggactttttttggttggtaagctattaattattgcctctatttcagagcctgttattggtctattcagagattcaacttcttcctggtttagtcttgggagagtgtatgtgtcgaggaatttatccatttcttctagattttctagttcttttgcatagaggtggttatagtattctctgatggtagtttgtatttccatgggattggtggtgatatccccttcattttttattgcttctatttgattcttttctcttttcttctttatagtcttgctagcagtctatcaattttgttgatcttttcaaaaaaccagctcctggattcattttttttgaagggttttttgtgtctctatttcgttcacttctgctctgatcttagttatttctcaccttctgctggcttttgaatgtgtttgctcttgcttctctggtttttttaattgtgatgttaggatgtcaattttagatcttgcctgctttctcttgtgggcatttagtgctataaatttccctctacacactgctttgaatgtgtcccagagattctggtatgttgtgtctttgttctcattggtttcaaagaacatctttatttctaccttcatttcgttatgtaccaagtagtcattgaggagcaggttgttcagtttccatgtaactgagtagttttgagagactttcttaatcctgaattgtagttttattgcactgtggtctgagagacagtttgttataatttctgtacttttacatttgctgaggagagctttacttacaactatgtggtcaattttggaataggtgtggtatggtgctgaaaagaatatatattctattgatttgggggggatagttctgtagatgtctattagatctgcttggtgcagagctgacttcaattcctggatatccttgttaactttctgtcttgttgaaatgtctgatgttgacagtagggtgttaaagtctcccattattattgtgtgggactctaagtctctttgtaggtctctaaggacttgctttatgaatctgggtgctcctgtattgggtgcatatatatttaggatagttagctcttcttgttgaattgatccctttaccattatgtaatggccttctttgtctcttttgatctttgttggtttaaagtctgttttatcagagactaggattgcaacccctgcctttttttgttttccatttgcttggtagatctttctccacctctttattttgagcctatgtgtgtctctgcacgttagatgggtctcctgaatatagcacactgatgggtcttgactctttatccaatttgccagtctgtgtcttttaattggagcatttggcccatttacatttaaggttaatattgttatgtgtgaatttgattcagttattatgatgttagctggttattttgcttgttagttgaggcagtttcttcctagcatcaatggtcttcacaatttggcatgtttttgcagtggctggtaccggttgttcctttccatgttttgtgcttccttcaggagctcttttagggcaggactggtggtgacagaatctctcagcatttgcttgtctgtaaaggattttatttctccttcacttaagaaacttagtttggctggatatgaaattctggactgaaacttgttttctttaggaatgttgaatattggcccccactctcttctggcttgtagagtttctgcggagagatcagctgttagtctgatgggcttccccttgtgggtaacccgacctttctctctgcctgccctttaaattttttcttcatctctactttgctgaatctgacaattatgtgtctttgagttgctcttctcgaggagtatctttgtggcattctctgtatttcctgaatttgaatgttggcctgcctggctagattggggaagttctcctggataacatcctgcagagtgttttccaacttggttccattctccccgtcactttcaggtacaccaatcagatgtagatttggtcttttcacatagtcccatatttcttggaggctttgtttgtttctttttattcttttttctctaaacttctcctctcgcttcatttcattcatttgatcttccatcactgataccctttctttctatcgatcgaatcggctactgaggcttgtgcattcatcaggtagttctcctgccatggttttcagttccattaggtcctttaaggacttctctgcattggttattctagttagccagtcgtctaattttttttcaaggtttttaacttctttgccatgggttcaaacttcctcctttagctcggagtagtgtgatcatctgaagccttcttctctcaactcatcaaagtcattctctgtccaacgttgctccattgctggtgaggagctgctttcctttggaggaggagaggcactctgatttttagagtctccagtttttctgctctgttttttccccatctttgtggttttatcttcctttggtctttgatgatggtgatgtacagatggggttttggtgtggatgtcctttctgtttgttagttttccttctaacagtcaggaccctcagctgcaggtctgttggaatttgctggaggtccactccagaccttgtgtgcctgggtatcagcagcagaggctgcagaacagtggatattgctgaacagcaaatgctgctgcctgatccttcctctggaaattttgtctcagaggagtacctggccatctgaggtgtcagactgcccctactggggatgcgtcccagttacgctactcaggggtcagggacccacttgaggaggcagtctgtctgttctcagatctcaagctgcatgctgggagaaccactactctcttcaaagatgtcagacagggacatttaagtctgcagaggtttctgctgtcttttgtttggctatgccctgcccccagaggtggagtctacagaggcaggcaggcctccttgagctgaggtgggctccacccagttcgagcttccgggctgctttgtttacctactcaagcctgggcaatggtgggtgcccctcccccagcctcgccgccgccttgctatttgatctgagactgctgtctcagcaatgagcaagccttcatgggcgtaggaccctcaaagccaggtgcaggatataatctcctggtgtgccatttgctaagacctttagaaaagcacagtattagggtgggagtgacccaattttccaggtgccgtctgtcacccctttctttgactaggaaagggaattccctgaccgcttgctcttcataggtggggcgatgccttgccctgcttcagctcatgctttgtgtgctgcacccactgtccgacactccccagtgacatgaacgaggtacctcagttagaaatgcagaaatcacccaccttctgcatccctcacgctgggagctgtagactggagctgttcctctttggccatcttggctccaccccttactctcctattttctaatacaatttagaaaatgcataacactgaaggccttgtgaatgatgtcaccatgtgctttgtggttatctaagttggcgcagtttttcacttagcatcattgcattacttcctactatgccaaaacctagttgcgttctctcctatcctatttagcattgaaatagtcctagtggacgtgtttcagtatcagaggtggcaatcacatcttcagcttgctaatcattccaggaatgagcttcccataaagacgaaatatttggagctgttgatttctctctttcagaagtgggaggaaagcctgcagatgacccatccccattgcccattatagatgaggctactaaaggccaggggtattcagaacaaactggatgcagaactgaaacccgagcccaggtctcttggctaagctctagcactgcactatcctgccccccttgtattctacacttcatgctggagccctcctgctgcactgtctcaccctacacaccctcatcctgcacttcctcatcccatagcccctcattttgtactccttcccttgcacatctcatcctggaccccttcacctgtacccctcattctgtactcctcacctgtatccctcattctgcacctctcttcctggacccctccctctgaatccctcacccaggcctctcctcccgtactcgtcactgaacacctcatcctgtacctctcttcctggactcctcatcgtggactcctaacctggaccccctcatcctgccctcctcactgcacctctcatcctggactcgtgaacctgtttcccttgccctgtacccctcatcttcacccctcatcctacactccctgaccttcagctcacatcacaacctttttgccaaagtctgaagctgcctaacttcttcagtttctctcattctcagtctcagatggcacaaactttctttctgctcactccctttcccaagagaaaagcagaagaaacggagctccacatgctcacatgttaaagcaagaggtgatctaaaagaaacgcattggagctgagtcatcaaaaccgcatgccacgcctggccgttcctggcttagaggcaagaggatatgtacgcggtttaaaaaacacaggatgaatttcaagaatagaatagtcccatctataacttttaaatcagtaatgcaaaatatcatccatttctaagacaacacaattcagaaattttaacaaagactcttgttgagatcataaaaactcgtaaaggaaacagaaataccaaagaaaaataataaaggtaatgagaaaattgaaagcaacaaattccaattgaaaggaaaaaacctgtttgtaaaagtgggtccttgttgtatccgatgcagggatcccagtggtaaagatgtgggagaatgttatcacattcacacactcatggaacacatgagaaatgaggaaggcagccatatggctggaaaaaaataggaagctcattccaattacagagcctaaaatatcacctagaagtacaccttgttaatttcacaagctctttcataattcgcaaatatcattatcagaactttcattcttacctgagactaaaatacagattggagaacgtctcccaggaagtttgctctaacgtgagccccgcagcgcttaacctccgtgtcatttccactacatcttatctcagtttactttgacatgtaatctgtgaggatacatgttgggaagggagagtgcaatgtagctggagctaacgggccactaacactggaatttaaatgtcaaatttctgcgttagaatttaatgttctccggcaccacctgctctcctggctcatatgtgctgatatatttaaatatttaataatggcttatctcacattattaagaggaatctgtgcttataattcattcatgcaatataactcagaaaaaaatggaaatcaagagtcaatgggtcttctgatatttttcttaaagttaagactgtcctgaatgtcagcatatcttcatacaaactctccaaccctgtcaacaaaaaagggtgatgactggaaactcaatatctttctaatatatagtttgttgttattacttgtttgttttaatatcgtttcagtaaaatcctatgttcatcttattcgtcttgcgttaagacaacggaacgctagttggcctagctggtaattcacctaaagaaaacaatagcaacaatgaacacatataatctattaatttcagcttcaaacacttaattattaatatatttggtttgtaaatggctcttaatatctttggttactaaatggctcaccaagatgaagacattgtgtgctctgcaatggtctggagaaacaggattgaataaaatggggctctttctcaaggactcgaggacacacaaaacactctaggaaaactgttaccttagctaaaaaggagctgctgctggtagccacagggaaacattggaaggaatttccatcccagtgagctgtccaggagagaggtgcagctctcaagctgggccttggggaagggaagggttgtttcctacccgcaagggtaggaaggacccgcccggagagaagggaagcggcatgagcgccagtgtgggggagaacgatggatgggcacaggatggcaagcacacagcatgctacactgtgctacagcaccctgtggctcttgagaggacacgtgatctggaagaggggcagaaattcagtgacttgctctgtggtggctgcaccgtggtggggcacacgggagccacaggtgcacgaagaggctgactcatggaccagagtgagcagggtgaggcgaggagagacaggccggtgtgtccctcaccctgctggctgacgtggggcacagggtacacaacacagcggccgtaatatgacgggaatcgcacggtggatccttctcatacaacttccttgcaatgcagcaccagtgccacaggaatatgcacttttaagcccaccctgacctgaatctccgtctatgaagacccctgggtgatctccacgcatgcggcagtcggagacacggatgagagcagagaacatgataaatgcaggtacatgggagatctgtgcagaaatgcatccctttgccaacaggggaattcaaccaatagcagcagagcacccaccactgaagggtaactcccggacggtccaggggaggtggactcagagaaccagagagggcaccggatatacttcaggaattgggttccgaaaggtcatcattcagggacccaagcactcaagaatgaggctgccggcacatgaacagatttgggtccaggaatcagagcagcatcaacaaccagaaacagtctgtgttgactcattggctactgggctataattcctcaaacgtataaaaactcaactaagacttaaaaaaaaactggagtggtcctaagattattgataagggttaaatggcccatgataatgctacaaaaatctaaacagtccagaaactggctaagacactcactcacattttgcacatctctaaggatgcagctatacaacctgcagcttctgcacagctgcacaggtgtggggcataaagaggtccttgcattcccagagcttctgtctcctgggaagaaaggcaattaaacaattgttgggatggaggcagctcagggtggtataggattgtgtagcagcaaatcacataatctaggatgtgaggcttattggggaaagtaaactctgagatgagacgggaagatcagcaaatgatctacatggtgagtccatagaagaatgatccttgttggggagatacgtgtgcaaaggtaaaagagaggaaaaaaggaagatttgaagatcaggaagttccatgggacaaacatcaagtgtatgtgagtggtggtgagagatgaagatggaatctggaaaccactttacagaatattctgtggaccctgggaaggctccaaccaatttgaaacagtgtaggaacactctctatgttcatttttttaaaaaagataattctgactggacccctgtgtgtgagcaaaatagaagagtttagtagcggggagaaatgaagtttcgaccactacagaggccgcctagaggggacactgtggaagccgactaagggtaagagaatgaagataaacaggagggatgggatagaaggatatttactagacggaactgaccgaaattcgtggagaaaaagagaacaggatcataaaccaccaatgtcgctaagaagaaataacacaaaaacaataattataaatctgttgtccaaattctcaaagaatatagggagattattttccccggctgctagacaatgatgccgcactctgggtaagaacagacaatgctgtgatgtgagtcccaggtcaggaagcttgttctagaagcaaagagctaagcaccaggaaggcagacatgaccacttgtggtcccaagaatagaagggctagttttgtttcaagggatgtggagggcagtaacaataagtttgttctttagcatattaaatggaatggcagtcctcaggaaagcccgttgagaggatatttgaatttacagcacatgagttcatgtgacacgactctttcccttgcatgggcctcaccgcagactcaggtcccaccatcagatgcggccctcatcgctctgcggaactgaggctgctagagagggctcatagctgcacacctctcagggaagtgctcaaacaaaggccttaatttagaataaagaagaagatgcaagggctactgaccccgagacctggcattcctgccacagactgcaagtccagaaggcttttgctggatagaatgagggaatgcgcttctgaaggcatggctgaggagccagcttggagagtatgctgggaaggatgtgctgctgtcctctggatgtggtcttcaccctaaatccacggccataatgctgtgtcagtccccagaggctggaatacatggggccaggaactgaggaggggaagcaggagtagctgtctcacctccaccccaggagctgattgagatctctgctccccgatctctcaaattaggcaatgtggttgtagagaacctgcttctcagaggggagctgtctccatcagcaggaagaggaagggccccatgaaactgtaagctatccctgtggcccagcatcttccagatcctcatgcccaaggcctcaccagtaatggaagcagccatcatccttgcaggaggactggccctaatcaggagaaaaagctggggccattgtccccaatgagacaatacagatgagtgggacgatttatccatggggactctcttacgtgtgatagaacacggacaagtctagcagccacacctgagcagtgcactgtgagcagagaccgaggccctgtgaggacttgggtcagcatcgccctgctgcagaagccaactagcccagctgagaggccagctaaggaggcagatcctcacatgggccggacaggagggtggcggtgaggtgagtgtgtgttacacgtgttcctaggaaacgaggccagtcagaatcctagagaagctgtttccagatggagaatactgaccagtgctagtgctgggctgtatttgatcccaagggcaccatttgggtgctctcttcagaatccaggcccccccccccacctcccagctgctcgggacccacactgcatttcttttcaggaatcatcccaagcagtgttctggtccctccctgggggccacccatgtcaatggtcaatggcaccaagcctggcccaattgcttcagtttggaagactatacagtgccatcctagctccagacctccctgtagcatcatttaaggcaagggttcccaacccccaggccagggaccagtactcgtccatggcctgctaggaactgggccacacagcaggaggtgagcagcaggcaacggagcattaccacctgagctctgcctcccagcagatcagcagcaacattacattctcctaggagtgtgaaccctattgtgaactgcacatgcgagggatctaggctgcatgccctttatgagaatctaatacctgatgatctgtcactgtctcccatcacccagatgggactgtctagttgcaggaaaacaagctcagggctcccaatgattctacattatggagagttgtataattattttattacacattacattgtaataatagaaataaagtgcacagtaaatgcaatgcacttcagtcaccctgaaatcatcacctctcccagtccatggaaaaactgtctaccttaaaaccggtcccttgtgccaaaaaggctggggactcttatctaagaacctgatgtggtctgactgtttgtgtccctccaaattcctaagttgaaacctaacctcaaatttgatggttttcagagatgggccagcctttagagcgtgatgacatgatgagggtggagcccctgtgaacaggattagtgcccttgtgaaggatgtccaggcttgtggccttgcgctgtccaccacgtgaggacacagtgagaaggcgccatctatgaaccaggaaacggtcctcaccagacaccaaatctgccactgccttgatcgtggacttcccagaactgtgagagatacaattccattgtcgccaagccaactctatctccatattctgttacggcaacctgaatgaactaactgtgcacctgtcgtgactgggcactgttcaacctctccctccacccaactccacttccttctctgccttacagacgattccaagcacactcccaatacctcctgctacacaagtcaccaactcaggctctgcttccaagaaaaaggataatttgtcatagacttaagtcaagcccttggaaaaaaatgttaaatccaccttagatataaggctgtatgtgctgtgaaaaaggaggtacacattataaacgctttgtgacagtcaactgagcattcccacaacatgtaaacaaaaggttatttgaagccacgtcctgcagcttcaccttctctttagggttttagaagtcactactattctggcaggcactgtcttgtctgactatgaatagcgtattggcttcatgctcacaaggacaggggcatgagctcactttctacaaggaccagtgagctgtcctcggttcagggacagcaccctgtgccgtcattgcacttggacgctgttcaatgtgcataattgctcacctagagaagacgggcgagactgggctgggtaactcatgccagtacaaccacgcaagacgagaagcaccttcaagattacataacatcaatgctgtctcaaaagttccgtctgccaagaatggtaaagatgctggtttttgaaccatctcctacattcctgtattcagtacaacacacagcctcacttcccccatacaccctaggagcacagacccttggccacagactgagatgcctacacaaatttccattctcttattatcactgtattcatcggacgaaggagacaattccgtttcttgtatgaaatggtgatgctgaagtcaaataattttactggaatcactcttagtattagcccaaaataggtcttgttttgactatacagcagcacatcacaggaaacagttcctttaattcaccccctgctggaatgtaaatagctacggcaaattacatgaaacatgatttctggagatgcagttcatcaactagtgtgatgaactcgaaccgaatttttttttgtaaccaaaaatgcttcagagtcaactcactttactatagacagagaagccataaaaacgtgggaccactacaatagcaaacatgtaattgcttataaaaatatccagggatcaagtttgcttcttgttaacttcctcatggctagaagctgcagtggttatgagggaacccaactttcaattgagcatagggatttttctttattttctgtggactaacaatcagttgctatgagatatatattttattttcaaatataaaatggagaaactatgccccggactcacattatcttttcttatatagtattctgagatttactatttatatggattctatctattataaatatgatttataaatatataaataaatgatttttaagtatataaattatacaattatatataggtagaatctatatatatagcaaatttatatataaattgtatatgtaaaatttgttttaaaaatatatactagtcatatagagtttgcttatgaatggtcagtgttgctttatatggctctatcataattaatttacatcctgcttcttagcatttgggcttttgaacagattatttttaattcagtattttcatttgtaaaatggttttaaacaaagcttacctctctcccattactttctgacacttaacatgatctccctcaagagctctctttgttttttaaactttgcatttttttccccataatttgcttaggggaaattatcaattcacactctctctctctcgttctgtgtataatagctatagataatacacatgctcataagtatgaacaggcttatatactagggaatatgtataacacatactgtataacatacacatgccaactgaagtctagcaagagcgtttgtttctgtgaattgttcttctgtgtttgctgctggggcctcaccagcagggatccctgttgtttttcagtctctgagctcctccctgcctatcctccactcactgtgattttcaggggatgcacaggccctggttttcatttctccaccctacttgctttctgaaaaatgctcctaaaagggtccattaactgagtagaccctccaggcatcttgaggggatggaggagagaggattgtctttggggagttagagacagcacaaatggagaaatctcacatatgcccaagcctacgagcccgggaatgatggaggccacaggtgggtagagtggacccaaggtcctcctggtccacgtgtcctgaggcagccccctcaccattactgtgtgtgctggcagggggtagtgggggtgccaggaaagcatcctccagggagattttctcagagacaacagtgcccaaggtagcagagaccgtgaacatcttagggttagaagtgtgatccgaagatttgagggtccccgaaatattttacactactcaggctattcctgatttcttgtcaaggttggagtaggtaggtcagtaagggttgacatgggtggcctttggtaatgagtgaggttacaatgatagctactttcttaggatggagtctcagaaattcaagtcgatgttaaaataagatgatgtggcatttcttgcatagcagtttgtctagggtttgtagtctgagggactgactgtgactccaggtatgagagggcacacactgaaaatttctggggaaactatgagaaaatgtcgagagctgttgcctcagaggaagttaactggctcagctagaagctggagagaaggggtgcttacaattcatctaaacacccctcagttgggtttacatgtcttactgtgcacactattatttatataatgaaaacatcatgtttgtagaaaaaatctcaaaattaaaatgaaaatgcaaacagaaataagagctcgcatttcttaagttcttactccatgtgttatgagccttacatgttttactcagttgatttttcaataaaattatgaagcagttgtgattactaggacttttttttttaatgacgagtctgatacacaaagggtttaaataacttacactaaggttcagttactgggcagcagaaccagtattcaggggagtacagctccagagcctgtgttcctaacactagatgttagtgaaaatcaggcaacatcaaaacgtagaacatttaactctatgtgaatatatgctgtatatattttctgataatttttttttctttttttaagatggagtctcactctgttgcctaggctggagtgcagtggcacgatcttggctcactgcaagctccactacccgggttcaagcgattcttctgccccagcctcctgtgtatctgggattacaggtacccaccctccacaatcagctaattttttttttttttttttttttgtattctgaggagagataggggtttcaccatgttggccaggctggtctggaactcctgaccttaagtgatccgcctgccttggtctcccaaagcactatgattaaaggtgtcagcccccctgcccgggctgttttctgataatataatttatgaataactttgctttgagtcaaataatataaaattatgtatacgcataaaggtcacttttataagtgatttgcactttgtcttcaactgttagcttaatatagtactctggaaatatgcatttttagaatgtcttctactgttataatctcttaattttttaaaatcctcaaatgttgtattggttaatggttttaattacctttttgcctttggactattcttttgtcaaagataacacatgacattgaattggccatctctcaaggactgatggccattcacgtttttatgacatctcatgaaaagccatctcagggtggctactgagactcttaccacagcactaattagggtaaaatgtaattataattaatgtggtgtggtcattcactgtgaaatatgacacatagaagaatgtttaccttttattgggactacttatgtctcttcatagtcaaggatgcagtttgggcacgaggttcctctcctattcctggtaccataaacctcatgatgtgtatctcaatgctgctgagatgaatttactgcaatttgccctgttgggaagtgtctggtatttcactgatgatttcagattctaccaaaggcagcagcaaatgcaggtcatgtggaaaatatgatatctccaccatactttcctgaataactgcacagtcacataaaagttcaattgaaggtcaggtctaaaaattcaaacgtcaggaggtattcagcagttgcctctgcattctagttttagtcattgaaagggatgtaaatatacattttttgtcgtagtatttcttattcacaagggtcattaagtccccaacacaccccgtgtgtcagcaaggagggaccctattttatgctttgtagatgaggatactccggggtgggcccacacaccaagagaccctttaatattgtgaccctttatcccacacagagagagagagcagccaaggtgtggcgtgttcactcacatggactcatgacaatgtcccttaccatgcttgttgatttaggattggtggatgcttttttattatctccttcattgatttcatgggtaataacttcttgttacatttttcagctcctaaaactattcctatggtatacacttgggaaataagaacatactgcctatttactcaaattcaaaaagtagaataaaatacagttccaacagctccagataaatattctcatttttacctaaacacatacacatctatcggttcaaatactttaaggaactcagttaccaatgaaggaaccaataagatattttaaaaactatttcaaaggagaatccaaagatcacaactatatagacaatcagaaatactgaaataaacttgctaatccatttaaaagtaatcaatatccacaggacaataattaatgggatctttttcacaggaaattcatttgcatttcaatggttcagaaattgtttgcattgctatcagttttctataacttgtaaagttgtaaactagctcaaaaacaatgacaggcacagggctttcatttcaaatatttgaatttggctcataaaaatttataattgtaagtattttcagattcactatattgtcttttctatgtttgctcacataaaagaaggttttcagagacaccagccaatatgatatggtcaaaagatccccacatatgcccacacttcctagcttacacctaatacttcacctcactctttattttgggataatcagagcacatatcatggcaagccgagttttcagaagttaaacattctcattcacgaaagcgagtgttagtagactttaaggaagttcccgtcatgattcctatttatcagcattgtttgacttgttgattttacttctacctaaccaacacagaatgctctctgccctctcttggaatgctaacttccaaccctgtgaagtgtaatctcatcataccttggtaaacagctttaaacccaggtgagccaatgctatcatccgactgcagatgtagccacatctggttgctcatgctcacaatgaggtcaggaacactggatcccgtgagcctgcaagaaagagaaatgtcaaagcttttaggtaaggcaacaagtacatcgacttccacctgaaaggagggtcttgctgctttaaacagccaaaccctagatatataggtagcaagaccctctttcaaagactgtacagcctctggtccattatattaatattcaaacatcactatcactggtgctttacagaaattactctattctatggctgccaattcgtgaattttcttttaaaaaatcaatttagggcaatcaaccatcccattttcctggaaccgagaggcttccccaggtgcaggaattacaatgttacaactgggacagtcctggaaaaaatatggcacagttgttcatgtgaggtgactagagatgtgcacagttgctgtaggattgcacaacaccagccatgaaagacaaagcatctctatcacaacaaattgtatgggttcattcacaaaaggttttcattgtctagaactagtatgtaactttatcacaaactctccttttaaaatatattataggtaattatacattaagagaattttgaaaagaacaacatgcatagctgaaatagatttggcagcatttattgaacactccccccgcatattaatgtctgggtcacaccaaatgtgagtttcaatgaagcattcattgtgcattaacaaaacagtcacataggggctgctgtcagccagtgaaaagaaacactaaatccattgattgaactcaacatgctgacagaaaagcatgttgaaatagaaaaagtgtaagaagaaaatcaattcaaccaaaacaaatgtccctaatcaaataggaagcttgactttcagcaaagtagtttcaggaatatgagcatatgatttgccccatcaatcatatcatctgtctatcaaccctacatcctcaccttaggcagtacagagcaccggattcttcaaaggaagaagaacaactgtcattatatgtgaagtaactcatgcaatgttacacacaaattgaaaagaggaaactatttctgtgaatgctgtgtggttaactaaatatgtatttctttctgaagatttgtcttcgttggcaacattgttctttttcatttgcttgttttgttggcttgtttgaagagagatttttttctttctttcttattcatacatttattgaagtgtaacaagccaaaaagcgcacagatcgtgaatgtctaactctatgaatttttacaaagtgaaccgccacacagatcaacacttagacaattaccaacaccccaaagccttcttgtaccttctcccagtcaccatcctctcctcccatcttgccaaactatcagttttacatcttctttaaagtttttttgtaaatgaaatcatactatatataacattttgttcaacatgattttggtgaaatgtattcatgttattgtttgtagtattgtttcatttacttcaatttctacatagaatttatagtgtataaacacaagtaggggatgattaacatttctaaattcttgaaatttttattaagataattgtggatacacatgtggtaggtagtacaaaataatataaagagattacatgtattatttacctagtttccccgagtggtaacatcttgcaaaactataacaatcaggacattgacatggatacaacctaccagcctcgttaaaactttccctgttttattcgtattttgtatgtacatttgtgcatgtagctctgcacaaatacgtcacatgtctcggctcctgaatccaccgccatagtcaatgcagggcagctccattccttccaaattctctggtgctcttcccttaaaatcacactcatgcccctcttgctacacccccttcactgtccctaacccctggcaaccactaatcagtatccatctctaaattatttatttaaaaaaatcatacaaatgaaatcacagtgtttaacaacctgggattggattttacttagcttaattcctggaagatttatcccagttgttgtttataccaatagtttgttcccttttatcgctgggtagtatgtcatgttgtggatataccacagcttgcttaattaaccacctggtaaagggtatttggactgatactagttttggcagatgacacctaaagctgctttgaatatgtgtgtgcaggtttctgtgtgagcataaatcttcatttacctgagataaaagcgcaagagggcaatagctgcattgtgaaatcatgttgagtatttaaagaaactaccaaatttttccccagactgtttgtacattcccaccagcagtgtgtgagcaccccagattctttgtattctcaataggcattcggtgttgtcggcatttttccacactttaacagctacgtgcatttaactaatgggtaatgatgtacaacattgtctcatgggtttatttgccatttatacgtcttcttgaatgagaggtctctcttttcctccttttaaatactgaaaactctcttgatatattgtagtacagataccagtccttgtcagaaattagcagttttgatttaaatatagtcaattttggttccacatgcaattacaacaaattatattccataagtattagttgcagggctttctatatatcaagtttggaatctggcttagttccttccttctttccttccttccttcattccttccttccttcgttccttccttccttcatccctccctcctctccctccctccttccttcttcctctctccttccttccctccctccttcttcctctctccttccttccctccctctctccctcccttcttcctctctccttccttcctttccctccctccctcccttccttccttccttcttcctttcttctttccttccttccttccttgctttctgttatcattccctaagataagtgaatatataaaagaaaaatatgtatcttaagtcaaattcatggttttgggtagaagaaggaagaggaaagtaaacatactgttttaatattacacagttaaagaagaatgtgggcatagccgttagtttttccctacatgttaatacacacatggcacttggttcacatgcaaaacgagtcgaggagagtgttttcccttctccctttgggattacaggtgatgtcagcaccctactcatctgtgttccccactttacacccctttcactttgagacttatgccaccatgcaacatgactctactgctgtccatcatcgtcctctcccttcgtgtagcccctggcttgttgtcattgctccctgtgggcaatctgataatgcttgtaaagtgactcaagggttcttggctcttttaacccaataacttttctctccactctactgcaaggtataacatcaaggtgcaaggtatgaaatcactggtcataccttgcaccttcctactctttatcataacaaacttaagcacctaacccctcttgctgaccacactgcaacatcttttaactattgtaagtgtgtactttctgaaacacacttcccaattcttggggacctctactaatgattttgtcacatttttacccagcctggacaacatgattggtactctgctattctgtctttccagcaccttaactgtgttaaagtctactaccaatctgtcccatctctgacaaaactccaacttgagatcaatccaaccatccactctctatcttcctgtatgtgtgcacaagaaagatgatgaagaacttgctgatttatactgacatatatatatataaaatttccagactcacactagacacatggtgccacatttttttcctgaattatagtcagtgtatttttcctattgccatttgttattgccctaagtcgtcatcatttttctcaagcccattcccagcccttatttcttctgttctcagcagataactttactcataagtataagggggaaaacatttagggcagtcaaaacatgaaatacctgcctcttaaaatctcctaagttttttttttattcttttcatgtcaccagtcatcggccactagaagtaactgttgggggagtttattttcctcgtacttctttgatgtttttcacaccactgttttctccccatttccaacctctcagctgaacactgattatctcacacccaccccaccaaagtaggctcctaactctgtctcctggttctggcatttcatctcccctagacattcgacttgattttaacttactaaaaacgtaattgtcatgtaaaaaattcttacacattgaaaagacttatactgtctattcaactactttagacatacctctcagtcgatatatttaatttcttaagttctatactgaactttgctttaatttaatcttatattactttgttcatttgcatgaaacagtcagcaagcacactgccatattccacacaaagttcttcaatcaaatgtcaaatcaggtttatgtttattactcattttggaatttaagcctgctatgtgacagttatatttatgagaagaactgtaattacagcttattatagttattttaaagctgattaacttacaaaaatttcatacagtaaaagcactttttatttttaaatttttatgttattttataattatttaaaacaaaagaacttttgttcctctttctggtttttagaactattttggcttgctaacactgagatattatttctttaaaacaaagaagcaagcaatattgttgccctttgcaactggttatctgtttgaaacaggattttcaaaataataatacctgaaaaataaaatagatactggctttgattaaatacagtaggtgctcaaatgaagtcattttgttgaatgtcatttcattataacaatgatgaagaagatagattcctagcaggggtggtgtctgtatgggtgtatcagtctactctcacactgctatgaagatattatccaagacctagagactgggtaatttataaagaaaggagatttaactgactcgtatttccacatggcttgggaggcctcaggaaacttacaatcatggtagagggtgaaagggaagcaaggcacgtcttacatggcaggaggagagagcatgtgagggaggaaatgtcaaacataaaaccatcagatctagtaaaaactccttcaccattatgagaacagcatgggggaaactgcccccatgatccaaacacctccctcaacacatggggattatagagattacaattagagatgagatttgagtggggacacagagccaagtcatatcaatcaggttggcatgctccccatgtctgcctggacttgctcccaggttttctcccacatcccaaagctgtgcatgtgaggtttattggcattagctaatgagctggttggaaaaggaatgaatgaatgaatataaatcgtcaaataaaaatgtttcaagtatatgataatcatacaaatgcaggacaataaacaatgcaatagcaaagtgctcagggagctgtcacatgtgtaaatgtttttgacctctctcgggggaagaggttttcctgacaatgttttcttggcaaacaaacatttatttatcccttgatgtaaccaacctgcacccctatgaatgtcactcatccatccaccaaaaatttggtaaacagtaatctttcttgtcttcattaatctttcttaaaagtgtgtatagttcacatttacttaaatgtttaatattaggagtgttttggtctttatgcagaagtttggtcttgctttttgtgagcagaaatatgcttaggaacttaactcttgtttatatcaattagcctaaggggaaattggttttggtatacagagttttacttgaagtcacagtttccaaagacctattaatgatgttaagtgggaacttactatactttaacattcatcaaaacatatagttacacaactagtcttgctttctttaacacagctcaatttttccccaagttgactctatagtacatattgttctgatttaaacttaaaaataatgttatcctaatgaaacactaaataaatctatttttgatagaggaaaatataattttattttggagaaataagccatcatattgtagctgcctgccttttttgcccccaagccctgcagtgtaaaactctgtcatctcccaggcgtgttcagctccagccatatttatttttccccattctccagaatgatggcatttctccgttcccagggctttgcaaaccctgaaatccttgtatggactgtcaactcttcctgctaagctaagagtctttgaagactctgaggattctcgctgggcatttcttagcctcttgaagccagattaggatttttgcctctaggtcatcacagaatccttcacgcaattcagtttcacagaaaactgcttcaacctccaccttctttcaaattctgagctctctgggtgcaattttatgtctcttggccactttatccctagtctctagtaaataacataaacatttttaaaataaatcaataaataaaaatataaattaacctacactgtattcattatacagctacatgtttaaattttataggaatatttccaaataatgatgtaaatcttagtgttatgttaggcagcataccaagggcttaacatttggagttctgtgatggctctgtcattaattcacgtgtgattttagctaaatcattttatctgtattccaggttcctcatctatgaaacaagagaattgtattaatccaacctgaaggaactcttcagacctaaaattctgtgatcttttgcacagatttcagtgaagatactgctgtctcacattgatatgtctggttgcagtcagtatcgatgttgaactgaaatcaacagtgattatttctccaatttcaagtatgtgaagcggttaacccaaaatgaaggaaatgatatgtgattatgtatttgttcctgccttacaactagggcactttgtgagtacctttaactctttgagagtgtaactaaactctttccaatgcaaatgtgtcagtgttcttgaaagcttaatgacaaccataagatacagtaactttatgatgttttggttacttgtcattttactgtgtagacaagaacaatttcatctctgatcaaatcttccctttgcaccttgctaaatggttcaatagttctattctaatctacgtgaaatacatgtgttaagggctggaggtgatggctcatgcctgtaatcccagcactttcggaggctgaggtgggaagactatttgagtccaggagttcaagactagcctgcgcaacatagcgaggccttggctcaaccaaaatacaaatgcaaaaacaaaacaagagatggataacacctatctctgactctgaaatctttcatcaacataacccactgaaattcccatgttgttgtgtgtatcagtagtttgtttttgggagtaatgattttagttctcttataaaaatatacatgtgtttttccaattccctgtcaaagaatattcacaatgtttctattttggcaattatgaatagagttactataaacattcacatggtataaaatttttctagggtaaatacttaggaggtggatttctgggccatatgattgatgtatatttactatcatatgaaactaccaacctatcttccagaatggcggtaccacttggcttttccgcttgcaatctcaaaggttacacagaacatacatccattggtgtgacattctcacaccccaaaattacaaggataaataatgaatcagccaggcttggtggcttactcctgtaatgccagcacttttttgaggccaaggcgggcagattacttgaggtcaggagttcgagaccagcctggccaacatgatcaaactccatctctactaaaaatatgaacattagccaggcttggtggcagacatctgtaatcccagctacttgggaggctgaggcaagggaatggcttgaacctgggaagcagaggtcgcagtgagccaagaccgtgtcactgcaccctgagcaacagagcgaaactccgcctcaaaaaaaaaaaaaaaaaaaatgtgaatcagtaagtagttcagggtttaagttgggggagcctgtcaacacaaagggatactacagtattttgaagtgaagggaatgttctgtgttctgattttgctggtggttacacagatctatacatgtatttacagtcatagatctgtacacacagaaagttctactttactgtatatcacttaaaaataatttgttcagacctgaagaaaaattctgcatgtgtcacgaagctgtcaaaatacaacactaataaaatgtagcacctgcaatatgagatgcctggattttatgggtatgtacctgaattttaaaaaagggggagatgtgctaaacctttaatatactcattacagttgaaaatttgacaatggaaacgtaaagcctgcccttcagataaaaacttgcctaaaactgaactgctttgtagtctttatgttcctttaatgtccacgaatggcataaattgttcagaatgtggagaaagcagagttacttaattgtatgatttaagtgactacttgccttaattgggtagacacagggtgagctggagattaataaggataagtaaagacaaggtactatcttttcaggcacctgggtacctgggcagactcattcctcttgaggatggagtaaaataccagtaatgagtttcagacatgtgttgataaatatctctggtacaaattggcagctgcaaagcagccaggggcagaggaagaagtcaactcagttatttgataagccaaaccagaaggaatttaagctctggaaggccatatttgcactcttgggtctctcacatatcttcagatacagtattgaggaggtactgagagcaagtaaagtgagttacacgttctccacctacccagcacctagccgggttcccaggacatggtagttacagattccatgtttatttatatgatgtgtaccactgcagagggccagggcaggtggaaaagagcaggaatctgatttataaatcaagctgactgaaaaataagtcaagggagtgctttcattgaataaataatcatattattaaatacaatgttaaaactgaagataattcatacatatactgaagttactatcatttccccactggcatcaacatgaaattagaacaagctttagatttcatttactttgactcatgcacacgcctcactcaagtatggcagactttatttactgtgctgaaatccattacagccaggtggcacagaagatgatgtgacttaacatcaatcatttacaatcgctattttaaattcactaaacattatctgaattataaattgttcacgtgcggaactgcgtgaaaaagatgtaatccaaacctcttgatcttgcagatctaaggggaaaataaaagttgactaaagcccaacgtgatgctactttacagatttcctttactgagtgcagcccacactacttaaaagtatatggactgccagtcctcatgacatgcagatccttttttccttccccctctgtgtaaaacacaaatatcaggcctgataatggcacaagaagctaccagaagacactgctaaaatgtgataggagaaagacaagctggcctgggaccgaagaccagagaaacagcagagcatggggtgacttgtggccgatcacaaacagaaggccactccgacttgctgttttccacccctgaacaggcaacagaaggaccccagcaagcccgttccttctccagatgcaactgtgacccgtctgactaccagactacgcagcaccacagcaaataaaatggatgtaagagccacaccaacaacaaacatccaaggaagtcttcatgttccttgtggtcccagggctgccttgtcgaagaaaaaatatctaagaaggcagaacctgcaagagggatgcagctatataaatgatctcacctggggaggcccttcgtcccagtaggtgtgagactgagtctcttccccacccagacacagcggtagagtgggcggaataggtgacggggcactgcaaagagtggtccctccgacctccctcatcgcctcaccaacatctccccaagcccacccaaccccatgcactccaagcctgggaaatccttctgccccctcagccagcaccagcagaaagcagtggagactccttgggcactaaaggcactgagcagataaaagtaaacccttgaagcctccaatagtcaaattatcattggaacctcctccccagcccacaaaataggctgagacccacatgccaagcctaaacaaggtacttgcttgctaaaatattaggtgggtacaaaagcaattgcagtttttgccattatttttatttatttatttattttttagactaagtttcactcttgtcacccaggctggagtgcagtggcatgatcttggctcaccgcaacctccgcctcctgggttcaagtgattctcctgcctcagcctcccaagtggctgggattacaggcatgcaccaccatgcccagctaattttgtacttttagtacatatggggtttctccgtattggtcatgctagtcttgaactcccgaccttaggtgatctgcccacctcggccccccaaagtgctgggattacaggtgtgagccaccgcgcccagcctgccatttctttcaatggcataaatgccattactttcagtggcaaaaaaccacagttgctttttcatcaatctcataaaaaatataaatagtacctagcaatacctaacatgacacacaaaagagctgggacacaatcatcacaccaagagccaaggaaatcacggcttgaatgatgaaagacaatcaaccaaccccaacagaaatgaatcagagggtggattttaaagccaggtcgcttaaaaatgcttcagtgatcatttacaaattatctgcaaacagatgaaaaaaaacgataaatctaagtaaagaaataagttataaaaatgaactaaaaggaaattatggaactaaaaataacagaagagaaaactaaaaatagctagatttgcttaatattaaaattgaaatgagcaataatagaatcagtgaacttgagatcaatggaattctcctacactaaacaacagagacaaaacagactacaaatggaaaaggggccgggagtggtgactcacatctgtaatctcagcactttgggaggcctaggtggatggattgcctgagctcaggagttcaagaccagcctgggcaacacggtgaaaccccatctttattaaaatacaaaaaaaaattagctgggtgtggtggcacacacctgtagtccctactactcaggaggttgaggcagaagaattgcttgaacccaggaggcggaggatgcattgagcacagatcgtgccactgcactccagccccctggagcaatggagaaagactctgtctcaaaaataaaaaattaaaaggaaaaacgaataaagcttcagaggcctgtgggacaaaacaaaacaaaacaaatacacatagaaaaaagaatccaactattttttatcattagaattccaaaaggagacgagctagatgatggtgttgaaattatttaaaaaaataattgctgaaaacttaccaaatttggcaaaacacgtgaatttatagacccaaaaaaatctaagttaacctctcaaaaataaacctaaacaaatccattccaagacacatctaatccaagttttaaaaactaaagacagaaaaaacaaccaaaaagaaacaaaatgttacctacaggataaaactacttcaatgacaatgattttcccatttgggatcatggaggccagaaggaagaactgacaaccacaaattctatattcagtgaatctatccttcagaaataaagggaacttaaaaaaattatcaggcgtataatttgtttttgcaaattaagagtaggtggtaggctgggggcaatggctcacgcctgtaatcccagcactttgggaggccgaggtgagcggatcacaaggtcaggagatcgagactatcctggctaacatagtgaaaccctgtctgaactaaaaatacaaaaaattagccaggcgtggtggcaggcacctgtagtcccagctactagggaggctgaggcaggagagtgctttgaacccagaaggcggagcttgcagtgagcccagattagccactgcactccagcctgggcaacagagcgagactccatctcaaaaaaaaaaaaaaaaaaaaaaaaaccagagtagttggtagacctgcccttaatggttggctcaagaacattcttcttgaaaagaaatgaaggagaaaagaaaagaaacttttacctgtgttttcaaaagagaaaaaacaagaggaatctatacaatataaactggactattttgcttaccatgagttccataaatcttacttaatgattgaaacaacaattagaacagcgtctggtacttcagataataatttcaaaaagttgaaggggtaaagggccctaaatgcaagtgcagtttccatacttcaggtggtaaatgttcgcattagttgtagtaagataaataatggcctcactcctgtccaatcctgctctcactctaatccctcaaatctgtgaaacttacttttcagatgaaagattttgcaaatgtgattaagttaaggatcgaaatgtgggggattgtcctgaatgatgtaggtgggccctaaatgccaccactagtatccatataagagagaggcagagggagatttcaggcagagaagatggtctcgtgactctgaattcagagagtgggttgatgtggccacaagccaaggaacgccagcagctgccctaagctggaagaagaaagggatgaattcttccccagggcctttggagtgattacagctctgcccacatgttgatgctggcctagaaaacctgacttggacttctggtttccagaactgagagtacaaatttctgctgttttgagccaccaagtttgtggaatattctatagtaacagtaggaaataaatgtatcagtagactgttataagtcacatatgtttattgtaatgcccagaacaaccactttgaaaactacaaagaaatacatgaaatataccacaaacaggttaagataaaattaaaaaacaaaacttaataacccttaggaaggcaagaaaagcagtaaaaggggaatgagaaccagaaataaagaaataataaaatgccagacaaagcactaaacatatcaataattaccttaaatataaatggtctagatatgccactgaaatatcagagagaggcagaatgtattaaaaaattacccaaataatgaggcttaaaatatatgtcaaaatcaatgacccaggcatattgatagtaaaagaaacaaaagacataccatgtaaatattaataataaaaagcaggagtgcctatgttaatatctgacaaagtagacttaaggcaaataaaagtatcagagacaaagagggacaccacaaaataataaaaggattgacccaccagaaatatgtaacactcctaaatgtgtacaaaccaaatatcagagcttcacgacaagaagcaaaaactgataaagctaagagaaaaatagcaacctccacaagtatagttgaaaactttagcacccttagcaaacaggcagaaaatatcacaaaggatattcaatcaaccaacaggatctaactgacgaatatggaactctcaactcaatacacatgtttttcaaagccctatgaaaagctgacaaaagataaatcacaccctgggccagataatagatcttgacatattcaaatgaactgaaatcatagagaatttgttctctgatcacaaaggaatcaaactagaaatcagttattaaaaggcagtagaaaaatctctaaacatatggaagttaaataacacatttctaaataatccatgattcaaagggaaagtctcaagtgaaataaagaaatacatagaatgaagttaaaataaaaacacaacatataaaaatatgtgggaagcagataaaacagtgccaagaggaaaatttataacagtaaatgactacattagatagaaaagaatgaaaaaaattacttaagttcctacctcaagattctagcataagtaatgcaaaatagactcaaagaaactaggaggaagagtgcgatagaggtctaaattaatgaaatagaaatagataaacagtagaaaaaataacgaaacaaatattctctttcaaaaataatataattgatgaagctataagaacacttgcagaaagtcagaaaaagagaaagggagagagagatagaagggaacaattacaaataccagaaataaaatagaggctattactacagattcatcagccatcacaaagataataaggaaatattataaataactgtaaattcataaattcaacatattattagatataaactgatttgtcaaaaactattaactaccaaaactcaaccaagataaaacagacaatctaaatagtcctttattatagaaattaatggtataacatgttcaccaaaaataaaatcctcagacccagatggtttcaatagaaaattctactaatttataagtaacaattaacgtcaagatttcataaactcttgcagaaaataacaaaagagaaaatattttatagccattataatcttataatgaagatagtattcaactgataccaaagtcagacaaaggcagtacaaaaaagaaagagaaaactatagaccgatatcttttatgaatgtagttgcaaatatcctcaacaaaatattagaaaactgaatgcaacaatgtacaaatcaattatactcaatcatgaagtagaatttattccattttatgaaaggctgagtcaacttttaaaaaaatcaatcaatgtcatccaccattagaagaggctaaagaaagaacatgatatatcagctaatgccaaaaaagaaacatttgacgattcacaggacacatagtgttcatgagctgaaagatttaacatagtaaatatgtcaattttctccaaatttatcaatagctttaatgtaattcctatcacaatcccagcaatgtttttatacattgctgggagtatacatgcatatatgtttatggtactctcaaacttatatagattggcacctgccctagaatagttaagtctcttgacaaagaacaataaagtgagaaacatcactccgcctgatattaacatttactaaacagttatagtaattagtaatgtgtggcattggtagaagactagacacacatcagtgtaacagaacagagagctcagaaatagacccacacaaatacatctaactagtttttgatgaaggcagaaaagcagttcaatggagaaaggcgagtcctttcaacaaatgctactgaacagttggatacacgaactgccaggcaaaccgtgaacctcaacctctgtctcatgccatatacaaaaactaactcaaaagggataagagacttaaatgtaatatgtaaaactgtaaaacttttaggaatatgtatagaaggactcctctgtaaagtacagctaggcaaagaatccttagagttgacagcaaaagcactggcctttatgggaaagcccataaactagacttcatcaaaattaaaagcttttgccatgtgttgaaacccacatgaagaaagtgaaaagacaagccgcagactgagaaaaaatagctgcaaaccatgtattctacaaagcactaatatcttgactacacaaagaattctccaaacttagtaagaaacatccgcttagaaaatgggaaaaagacttagacattttgccaaagaggatgtcagatagtaaataagcatctgacaaaatgttcagtatcattagccatcaggaaaatgcaaatttaaaccacaacgaggtgtcattacacaacttttggagcagaaaaagtggtgataaaaccaattgtggggacggcgtgagcatgaggaccacttaacatcatgggctgtgatgttggagaaccatgctggaaaacagctgagcagtttcctacaaaactaaacatacaaccaacatacaactcaagcaattacactcctaagtaatttccaagagaaataaaaactcatgtttacataacaacctatacacaaatgtcatagtagctttcttcataatagtcaaatactagaagcaatccaggtgtccatctgtgggtgaatataaactgtggaacattcataccttgaaataccagccagcaaaaaacgggaggaaacgattgcagtacacaaagtccagggaattttgctgagtgagaagcaatcatagaaggtaacacactacgtgcttctaattatataacattcttgcaatgacaaatttttagagctggagtgcagataatgtttggcaggggtcagctttaagtgtagaaaacagggagttggctatgattattaaggaaaatatgagggaactttggggtattagaaattacctgtcttgactgtggcggatacaggaacttaaacaggtagtgaaattgtatagaacttcataacaatacacacacacacagagagagagagagagagagagagagggagagagagaaacacaaatgaatacaaataaaacaggaaattaaatgagctgggtgtggtggcgcatgctggttatcccagctactcctgagactgaggcatgagaatcccttgaacttgagaggcagcagttgcagtgagttgagattgtgccactgcactacagcctgggtgacagagcgagactcagcctcaaaaaaataaaataaaataaaataaaataaaataaaataaaataaaataaaataaaataaaataaaataaaataaaacaggaaatctgaataagatcagtggatcatatcaaggtgaatatcctggttgtgacattttactgtagatttgcaaaacatttccactggagatccggacgaagtctataaagatcccttcgtattaacaccaggggttcaatgagcgattaggcagcatttttttcctcagtgactatcgattcgagttctccttgtcttcacttggcagatagaaatgatatctttgtcacaattttgtcaagaaacaatactggtgcattaaatgacagttcaatctcctctttccttgtttctttctgttatatttcattttcaaatttgattctgaacatggcagaactctggatgttttattatattaagacagcgatgataactatagtaatacaatattaccttctccttgtactgtacttttaatctttttaaaactattttttatctaccattctatttgatgcaacaatccattgagggtaaaaggcacaagagagggagtcagggatggtgcactgtaaatgcatgcatctattgttttaatggacttatctccccaaaatagtagcatccttcgatgtttatttgagatgaaaaacaaacaataaaaatctttaaatgcttttgactgatgaattctggaagagattcctgggtcttttgggtctgtaaaaacaggcatgcattttttggctcctcagagaaaatagccacagtgagtctacacctgtgatagaacagccagaacaactggaaatgactcctgctgttcactcagctgcctggagcccagattagctgaaatggagcaccaccttatttgcagcagcagctgccctcgggctccgattcctgtgggacctatggcttcttcttccctgtaggaaggttgccctcaagacacatccaatgggtccccaaggtccctgactctgctggctttcccagatagctccactgcagctgctagcccaaatccaaaatgctgaagcccagtggtttgtttatccccctaccaacagggttcttggaagaggaaacccaaaccacacagggtgtccagagagatctggcaatgtctgaactgtccagtactaatgacgaaggttgggcagccctagccatcctgaagcttgctactcaatcctccttgatcctggggagttgatcctgaacctctcacacacagaaggtgacacaaaagcacttacctggcataacaacattctactaaccaggccaagtaaccattactacaggagaaggctaagagtgtactagcattatacagaaatgacttggttattccagtaactgggccgctctcttcagacaacagtgattgatgtattatcagcatacttttttatttatttagtttttgagacagagtctagctctgtctcccaggctggagtgcagtggcgcgatcttggctctctgcaagctccacctcctgggttcacgccattctcctgcctcagcctcccaagtagatgggactacaggcgcccgccaccacgcccggctaattttttgtatttttagtagagacagggtttcaccatgttagccaggatggtctcgttctcctgacctcgtgatctgcccgcctcggcctccccaagtgttgggattacaggcatgagccaccatgcccggcctatcagtataaatttaaggcagattttaggaatagcatatataaatcgatacatctagtcacaaggagggtattctacatccaccaaagtatcgggtaaatttggtgtataaatatttagaattcttaacgtttatctacttagaataatggaattgccagatagaattttcaaaggaggtgcctacaaacacattgtcaagaaggcgggtccctttttaatgctgaaattagctgtgaatgtttttaagagttcctggaagcttacaaattacactaagtgctaaaagaatcccatggaatattttgtgatttcccagaaatcgtaaaaatcctcaaggcattgctgaaacctcacttagtaacattaccaattttttctaacaagatcccatcaacattttgatattaatggttttgtttttaaacttgtttgcatcccattagagatgtgtattttatgagtaatttactttccagacacagaagactaaaaaaaagaccctacaaacgcaatcaaaatatacttagaagaggtgactttttttttctaaactcaaaccaaataaatgtttagaaactcatagtattattattattattattattatttttctttttgaaatagtgtcttgctctgttgctcaggctggagtgcagtggggtcatcatagctcactgcagccttgatctcctgggcacaatcgaccctttcaccttagcctcctgagtagctgggactgcaggcatgcaccaccacacccggctaatttttgtctttgtttttttgtagagacggagtttcatcctgttgcccaggttggtctcaaacttttggcctcaagtatttctccctcctcggcttcccaaagttccgggattataggcgtataccagcatgcctggccaataacatgtcttttgaccttttacattcaaggctaaaaccgatagataaatgtatctggaagatagtatgcttcttgcagtataaaatgtaatacaaaatttatagcagtattagcactcttactattaataatgtagattcatactgctaattatatgaaatgtatatcagtaggctaattcctcctcaaggctaggacaatggcttattctctctctgcctcctcgctgagtcctagcataatatttggcattcaataaataattatttaaagaatcaagcaagaacgcttccagataagaggccgggaaagaaaagctaacaatggatagacttcaagtcaagaacagggttcaaacagttgagtctgtctatactgtcactggcattcaggctcaaaggcagtgccattatgtgaaagataatatacagaaaaataattgggatcatgtgattccagagttttaagaatcttatttctatttggtttgatttctaatcatgttttctgatttttttaaaaccgaaaatgtatttaagtcaatatctttatatctttattaccaacatcaattgtttatgctttcccccaaggcactacatgtttagtgattaactctgtgataacattaaagatatataaagatacacacacaaatacacacgtctgtgcatagtgtctgctttttaatggctcttcagcagtcttttaataaaaagagaatgataccctttgactcaggatcagcagaaaacaacagggagaaatgacgtctcagccatgccaggcagtgtctgggagcaagaagtagattcagcaaaaatggattaatccagccctaagaaagaaccagtatcctgatttgttaatccacacatctggttaggcagaggctaccctacttgctcacagatgtccctaataatattgactattcattctcatagagggacgggcattttaaaactgtaacctgtgcctgccacccacagaacgtcctgaattaatgaaatcccctggttaccaatggctaatagctgcaaaggccagagggaatccagggaaggccatagctctccatgcagttcctccacaaatcaaattcgagaacagtctcaatagatgtacttggaaagaactcaacagacatttgcaaagaaagttacttaactttcttttaagcctgacattctataaatatgacccaagttccttcaaccacctctcagggaaggtggattacagaaggagtcccttcatgtttttattcttttatattgtgccataaaaattaacaaaatgagaagtcattgccagaaataagaatttttaaaaccgtatttagggtgagctatatagttttaggctatttcattttccaaatttctcttaaaatcgagatgtaactagaattccatatttcccacaaaatggaaacccacaaaatattgagtttgaagtagtgaatgccagtctgccatgaagaggttttaaactgctgctttatgtaaaatgtgtgtcatgtgatcctctgacttcgtatactgactagtatttaaactattccagtctatctgtcatttctccaattagatgatagactccatgctgggaagaatgtttgcatataagtactcaaaagtatttgtcgatgtatcgcctaaaattatctgtttattcaaagagactagctgtgattctctgtgttcggttatttttctgtgatctggtacactaaggacatatatcagtggcttttctttcctcttctgcagctgattaaatgcccagctgatcccggctgcattatgtttcccaaagggcatctcagtttgattcagttggctgtttagtttttcatttacagattcaagctattgagagaaggcgctaataacacttctgtcaatgtaatacatagtttgcaattgctttcttaacaacaaatagcattaaaaaatgagtgtatgattttagatctttaataataacctaagggatttcataaggcattacctgcctgcatttatattttaaattttgcagttatttaacaatttttctcatttattttagtgacatcctctcttaaattaggtgttttggtaataataatacgtgtgggttacatttttcagctctccggagtgtttgcatgcattatttcatttttctatttcccacaggctggaaaagtttattatacatattttatagccaggaaaagacaggcagagagaaggaaaatgacttccctcagggtcatggggatagcaaatagctggagccagaaactctatctttgacttgcaggcccctttctatccactgtagtgctgttcccaaccctgtcccaggtcaaaggcaggcagtgtgtgcgacgatcgccttagaagcttgcccaaaatatagatatctgggccctcagatgtaggactctgtttttaaaaataaaaagaaaaaaatttttttttacctagtaatttgtcaacaaaaaagagtcattatttggcaagggtgcagaaaaataggatccttcatgttccactgaggtttatataaattttcaggggggataattggagaaacgtaacaatgtaaatgaagatgcctcttcatccccaaattcctcaatggaaatgttcctgaaggtatagcaaaaaagtatgccaatgtctacatacaaagatattcacttcacagctgcttatagaagtgaaagaatgcggtgagagcgtgagtgtcagatgcaaaagactgtcaaagggaaccaggtaaaaagcatggtaggtccacaggcgataaagactcaagatcctggagcagtatcacatcactgagttggaatccctgcctcaatgtacactaggtttgtgaactggggtaaatcctttaacctatcaaaacttcagcttcatcaatgataaagcaatgatattattagacccaaattcccaggattatagtaaagatcaaataaggtaaaatgtattatgcatttaacacagtgcatggtgcgtaaaagatacataaaagttagctaggacattactagtgttattctcatcattattataataagttgtggtccagcaacatgatttcaattatgcttattagtaatagttggaatgggccagcaggaagataagctagagggaggtgttctcttgcaaaatgtccaagattcgacgaatgaaggagtcgtgtccctggtggagtcctcttctgggtccatcgatttttaagggaatatacagaacagttggctagtgctttttcaatgtgtgaattatctcataagtaatcaataaataaggggataaggtgagtataacagactgcatctttttactagcatggaaatatgggatgctacccggggcaagattcctcacaaatgaagagtgttagggaaaccagccccacaccacccggcgggtaccccgagtccagcggagacaaaggagttagaaagagacagaatgagagtttaaaaggcgggtccaggggacctgaggatccggaggcttgctcacagcccagaggtcccggcctccacccaatttattggtttacaagctctttgttctcagggcaaatgggaggggtaggaagggatgaggaaaaggattaatcagtgaaggagaacttgtgagtcattcaacaaggtgtatgtgaatttcctccagcaaaggcgtgtgtctgaactacttaagatctttaacctattgggactgaaacgggtgggcgtgggtttcaggagaagccaagatgtttgattattctccattgcttcagtggagtgttatttccccaagcaaccagtggcatgccgctgagctcttctgctctcagagcataaagacatgaaggaaataaggagacttttctcctcagaagccgcccatggctccccatgggtgtctcacatagggcagaccagctcatctggcaccacagaaactctctttcccacaaagaggcatcctcagtagtatataagtagacaaagaaagcaaggtgaacacctgcagaacactttccattaatgaaagacgcttctggtttagtggtttcaagatctacaacatgaagagaagctatctgtggagttgcaaaggcagataagagcaggtatttcctttctcttaaaaacagagaggaagtacaccctcaaatcattttcctaattttcataaaccaggtgtgataaaatggacaaaaactgtctttgaggccctctctctggaagtagctgaagcagatgcccaggtcataaggctgcagaacagtctgtgatcctggtgaaaactgagaagtgggatcagtctgcaaatattcacagcaaggctgtcaccgtgtttgctaagactctggaatcagagttcttcaaaggtacactgagtcacccccaacacttttcccccccatgtctgttactttattacgcagttttacaggaagtctggaaaggtgtatggcattattccaaaaaagacctgtatttcccagactagaaagcatctgtacctctttaaaaaccctgataatataacatcacagggaagcagaggagagaggttaaaaaagaggtgttggctgggtgcggtggttcacacctgtaatccccaacactttgggaggctgaagtgggcaaatcaccagaggtcaggagttcgagaccaaccgggccaacatggcaaacgcctgtctctaataataatacaaaaattagcctggcatgatggcacacacctgtaatcccagctactcaggagggtgaggcaggtgaattgcttgaacccgggaggcggaggttgcagtgagccgagatctgaccactgcactgcagcctgggtgatagagtaagaacctgtctcaaaaaaaaaaaaaaaaaaagggggggcggaggggttgatttgaaaaatttattgttttttgctacctcatgagtatactaattttttgccataaacatatatgtttttaataattgaagaaaaacagtcgaaacagataacacatactcctaaattatactcataatgtgttctcatacaaaatgagattgcaggccactacattagccatagatggcactaagcaaacacctgaggccgaattacaagcctgtagcagaatctcatctccacccaccgtgccccgcactgcatgcataagagaagaagaagctcaaggacatactcacacgtacaagaccgatctggtgtctcccaccttcccagcatcaccaaccgtcagggtgtcatagcctcgctccagctcaaactcttcaaaggcaagcttgatgacctaaatacaaggtacgaaacagtgacttagaacaacaggtacttcccatgacttttaataggtattgcaaatatctagttatactgttaaattttgctccttaatgccaatgtcaaatgatcccagagctgctttaagtagttacatggataattatatatatttgatagcctggcattatagaattttatgaaattcagaattgctattactcccaacttatgtattttcacctctaaaaatgaaatttaacctctgcaacactttaagccaaatatctactaaatgtttactttaacattctcagtgcttaactaaatcaatattagcaaaagaaatgttggttatagttaatgacatatatttttaccatatccagaatgctctgcaataaatatttttaaagttctatatgcatacttcatggaattatccatattagcaccccaaaagactttatgaggatacaaagctctcctctatatttagtcttgcaaagcctgtaagttttttgtttgtttttttacaaagaatactttgtcatgatgagcagcaccaagacatctgtacaacaatggtttatgtttgatgtgccagtatattataatctattaacttctttctgtagagcacaagatctttttctcctgaaagaagaaatgcttcctttggtggccaatactatgaggaagaaaaagttaggctagaaccctgggtagtaaggagaaaaaggaaagaagataaatacatgatgataattagaggaatgatagatagatgatagattagatggatggtagaagattagcagatacagacagattagatgatagatagatagatagatagatagatagatagatagatagatagatagatagatgacagatagtagatagatgacagactggatggatggatgggtggatggaaaaatgacagacgatacacagatacatgaatatataaatgagagagagagagatgtaacaagagagacgcagagggtgtgagaaaggaaggcggaagagagaagggacaggaggaacagaaaccataatactggaagtacattttaataaactgtgttttagaatgaaacagaaattctgaaatagcgtagaaaagtatcaaatgcctgtttgttaagcttgaaagaaaagagtaagtggtagcatagagaagacagacttcccactaatacccaagtccatgtccaccattccaacaggctctaaacaggtgcttttccaagcaatgccaaaaaggaatacattacatttgctacttgaaattcttactaaaattattaatatagccattataatttatttaaaaaacctactatttcaaattgcagtatttgtatgaatacattattttagcaatctcatttgaaataggtgtcgaggttgatagctgttgcaaaccagtataaatactgcatgttaaacgtagcacctgatatttttatttctactttttgtttctcatgaaccaatttataagtgaccatcatctgataatcagacaattttaaaactgaaagaatcatcactgagacctgctggtttcctttccgacatgttaactcagtcctgacttgtttaaagttctggtgggaagcgatgataattcattaaggtttgtgtgtcatgtttggctgatttgcaatgtgtacagataggggtcacactatatgaatgggctctcattaggggtggaaaaagggccattctgtaattatttcaagccaaggcaaaggtagacagagaaagtctttgtcagtatttcatctcaacaatcagcaggtcctgttgtcaaacaccaatctttactccacgctgctgatgctcagtaaaaacagaaaatgcagccttggtcttgcatagacagcttttagtttgtcatatggcattttacaaatatatgcagctgtaaaatagaagtatgtgtattttaaccacatataccatcctttcagagtaaaagaaccagagatgcaaatgaaaactgaagacaaaaggataatacatttcaagttgtgagcaactttaatgacattgagccaaaatggttttagttcctacagcatatgcaccctccttatgtcttgcatggactccctcagctgtcctggagctggatgctccatatttctttttttacatataattatcttatctttccttaagttccggggtacatgggcaggatgtgcaggtttgggacataggtaaacacgtgccatggtggtttgctgcacctgtcaacccatcacctaggtattaagcccagcatgcattagctcttttccctgaagctttccccaaccaatgttcccgaaataggctccgatgtgtgttgttcctctccctgtgttcatgtgttctcattgttcagctcccctttgtaagtgagaacatgcggtgtttggttttctactcctgccatttttcttaagtgcctgcttaatgttcctccctcagctatggctccactgccgactctgtccaagaaagccagtctctttgccaaaatcctgcctatccccttcataacattccctgtgttggcagttttggttggtttgctgttctgcctgccctgcagagctccctgtaaggattgagggcagacaccatgtggcttgctcgtggagggaagcactggcctcaacctacaagaactcactgaacatcaactcctccaggccacagagctaggagtgtttatttgaaatctttctacttttttgatataggtgtttaatgctataaactaccctcttagcactgcttttactatatctcataggttttggtatgttgtatttctattttcatttcccagcactttgggaggccgaggagggtgggtcatgaggtcaggaattcgagaccagcttggcaaacagagtgaaaccctgtctccactaaaaatacaaaaattagcctggcatggtggcgtgtgcctatagccccagctactcgggaagctgaggcaggagaatcacttgaacctgggaggtggaggttgcagtgacctgagatcaccaccgccactgcactccaacctgggcaacagagtgagactccgtctcaaaaaaaaaattatgtttaaattttgttcttaatttctttatagacccattggcctatttcttcatagacccattggacactcaggaacatgtttaatttccatgtattcgtacaattttgaaagtttctcttgttatttatttctaattttatctgttacagtcaaaaaatatacttgatatgatttagatttttaaaaaatttgttgacccttgttttgtgggataacatacgatcagtcctgaagaatattcataccatgtactgatgagaaaaatgtgtattatgcagctgttggatgaaatgttctgtaaatgtccgttaggtccatttggtctacactatagtttaagtttaacacttctttattaattttctgtctagataatctgttccatgctgagagtagcaggatgttcaagtccacatctattattatattggagtctatctctcccatcaataatgtttgctttatatatctggggtctctggtgttgggtgcatatatgtttacaattgttatacattatttttgtctttgtctcattttacatttgtttcactttccatttatttatttatttatttatttagacacagtcttgctctgtcacccaggctggagtgcagtggtgcaatctcagctcactgcaacctgtctcctgggtttaagcaattctcatgtctcacccttctaggtatctgggattacagggtcaatatacccagccatttcacattttttcacttaaagtccatgttatctgataaaagtatggctattcctgctagtttttggtttctgtttgcatggactatctcttgtaatgtcttcagtttagtctatgcctttacaggtgcagtgagtttcttataggcagtatgcacttagatattgctttttaaattatattgtcacttggttatttctgttctggttgttttgcacatcctctattccattctcattctcttcttggttatttttgtggtttggtggttttctgtagtgatatggttttacttctttctcatttatttgtctgctctaccagtgaatattactcttttgtgtgtcttcacaatggtggttatcaccctttcactttcagatgaagggctcccataagcatttcttgtaggaccattccagtagtgataaatttttattagcttttcctcatccgggaataattttattcttacaactctaatgtatagctttgctgggtatagtattcttggctgacatttcttcttcttttttctttcagcattttcattatatcaccctgttctcccctagcctgtaacggttctgctgagaaatctaatgttagtctgggagcttcttgcttatatttgacttgactgttttgtcttgctgtttttagacttctctttgtctttgaagttttttattatgtatttatattgctatatcaaggtgtggatattttggaggtatatgtggtactttgatacatgtatacaaagtttaacgatcaaatcaggagaactgtgatatccatcacctcaaataattttttcttttttctttttcttgggaaaattacaaaatcaccaggagagaaggaagaattgtctttgacttttgatagtttgattataatgctctttggagagcatctttggcattagatctgtttggtgatctttgagcttcctggatctgaatgcacatatttctccaaaaatttgagaagttttcagctgttattttattatatagatatcctacacctttctgatctcttctccttctagaactcccataatgggaatatttgtcccctgcattttgttccacacattttgtaggcattccttattcttacttattcttttttgtctgactggcttattccgaaaatcctgtctccaggttcagaaattcttttttcatcttgatctagtctgttgttgaagctcttgattttattttttaaattgtattcattttattattcagtttcaagacttctgcttagttctttttgtgtaatatctctgttgaatttctcattcagatcatgaattgttttcctactttttgaattgtctatttttattctactgattctcacggcgtatctttaacatcattattttaaaaatcatataggcattttgtagctgtccttttctttgggatatggaattagaaaatgattttgttcccttgggggtgtcatgtttcttgctttttagacatttcttgtgttcctacattagtatctatacatctgacaaaacaatttctcctaatattagaatgtagttttagtaggaaaaaactttttcctgtagatgtgtctcatagtgtcagttgggtagggtgctttggtttgtattctgcatgagtacagtagtgcagtcttcatgatatttatttggttgtaatcaatgtctgcatgtttgtagctgtctgagtagccttggctgcaggtgtttgtggaagtgttggttcagctctaatgcagatggagactttggggtggccttgttttggggatatagaaggtcacatgagccatctctgcttctcagtggaatgagttttctggcagtggttggcctcaggtgggctggtccttgggtccctggggagcatgtgtgagcattcagcaactccactgcttggagtggggggagtgttcactgctggcagcagtacccaaaaggccagtccttggtctcctgcaagaggcatatatccagggtgcttgttggtagtgtgcctcaagaattcagctctcagggtcttgggagcatgcactttggctccccctgtcttgagagtggcctcccgactctgcttgacgacttgtggtatagggtacttcatggtcttgagtgctgggttcaggtttgtgtcactgagtgcagctggggtcatagtcctgcatccttctccttggctgtggtgggatgatggctgcgttctcaagatgtggagatgctactggccctgtgggcaggatgtactctgatagttcttctgtcctgaaaatggcaccatgctgcagcagcctgaggcccagagaacaagagaggaacccggtgtgagttctctccccggagcaaaacagtcatgtgggctgcaggtagctccctacccttggctcagggcctatgaggcctgtgggggcttttctgaagccctgaatacaggcatctggggtgggagtgtgacctgctggggatctcccacttaccttctccctacaatcgggagtccttttttggcactgaacggatcctacctgcgcacttcacgttcatctttatgctgccatcttgagtttccatgccttagagggtcttctttactctgttgcttcagtacagtgttctcccctagacactgcacttgacatgtgcttacctacttgtcattttggttcctctttgtgaaggaggaaagtgctgggcactctagctagacatctcgatgtctgctaagctttgcatgacttttagacatttctagatggtacgtcaagccactgtggccagtgagcatttagaaaaaaacagtatggagcttgggagaggttcacgaccagacacacagaaatgggggtccctaaccacagatgccacctaaaatactaagactctgtcagagtatcaaaggaaggcacgtgaaaagaagaggaatgaggatgagctgcagtctctttcatatttagaggtcaaggaattgaggaagaaatgacaaagaaaaaagaatctgtggtagggaggacaccaagaatatggtgttttgtgaaaaatccataaaactaaagatcttaaggaggagggagtgatcacatgtgttgaatgctactaagaatgtgaattagatgagctctaagatgagacgtgtgggcttgactggatggaggacatggataaccatggcaagaaagaacagcagagttgtaggcatggaagaagcgctaaagtggattggcagaatgggatgtgaggaagcggagtaagtggttctgcagatctctcaggtatcttaactaacatggatgaagagaagtaagaatgtgtcagagaggattttttcttttaatggagaatattgcaagagaataagaatgattcaataagtatataaatgattttgcaggaaagaaatattgttgctactttgattcaaataatatgtattttccttgacaaaatattaatttataaacaaaatgaaaagatttcccaaaaatcaaaaataaaatatactatatagtttcaatttactgaaaaaaattcatttgatatgggtccattcaaatagagagaccacttctcctgattcagttaaaccaaaagaatccaaatatatcaactgatctctatgatctttgcctctgtgcatgtgcatacacacatgctcacacacacaggcacagaaacacacatgcacacacatacacacacaccccaagaaaaatgtatgcatcattgggtttcttccttgatagcactatttttaagtttttccttttgatgttcttccgtaaactacatttgtttttctgaataacatgtttgtgtcagaaactgtgatggcaggcaaatgaataggaaaaatattttataattttccaagatttagaactgacagcacaatataaatcagtaccaagaccctacatcttggaataagataatttataaatgctttaattaataactgtaggtttgaaattaatgggttagaaatgacaactcagaacacactggaaggaacactggaaaactgacgctataatgtatctgattcattccacttcaaattatgtatcagaagaaaggcctttcaaacagtgaatttcctcataaaaaacatgataacaagtttatgtctggaaattattaacacggttgcaagaagaacgattacacattttaaaagaaaatgcacactttcttagaaaataaatattatcaaataattttacttgttttcacctgaggttgtaagggccaatcataaaacaactaaaaatgtaattaatgataaggagacaaactgaccaaatatatctaccatagatactggataaatatacgtttaaatttcctacaaaagaacacatacaacaatcattgctgatgggaatgcaaaatggtacagtcactttggaagatactttggaagcttcttacataaccaactatatgcttatcaaataatgaaataatcatatatcttggaatttaacaccaacagctaaaaacgtatgtccacacaaatcccagcactttggaaggctgaggctggcagatcacgaggtcaggagatcgagaccatactggctaacgtggtgaaaccccgtctctactaaaaatataaaaaaattagccgggcatggtggtgggcgcctgtagtcccagctactcgggaggctgaggcaggagactgacgcgaacccaggaggaggagcttgcagtgagctgagatcgcgccactgcactgcagcctgggggacagaccgagacttcatctcaaaaaaaaaaaaaaaaagaagtatttccacacaacaaacaactgcacatgtacgtttatagcaactttattcataatcgccaaaattaggaagcaaccaatatgtccttcagcaggtgaatggataaactgtggtatatccagacagtggaatattattcagggctaaaaggaaatgagctgtcaagccatgagaaaacatgggggaaaactaaatatattttaccaagtgaaacaagccaattttagaaggtgacgtgttgcaacatttcaactgcatgacatttcggagaaggcagaactatggagacagtaaaaagattagtgattgttaggggttagaagagggagggatgaagagcaggagcacagaggatttttaggacagtgaaactctctgtgtgatgttataatggtggacactgactttatacagttgcccaaatccacagagtaaatagcagccggagtgagccctaacgtgcactatggactttggtaattcagcatgaatcaatgttcatcatgcatgaacagcatgaatgcatgttcatcaaatgtaacaaacacaccatgctgaaagcatctggtgaggatgcttacagtggggaggttgtgcatgtgtgggggcagggggtacggggaaactatgtcttctgatcaattttgctgtgcaaactgctctaaaaataaaacctaataaattaacaaaaattacacatataagcttttatatctgtatgcaacacataccaatagcccacagtatacagtgtgaaattacaaagactgaatttcaacctagaaaaaagtactttgaacacacacacccacacacaaagaaagggagttagaaaaatatgtcattaattctgggatatccttgctttatctgagatgtttagccccacatataaacactaggagtctcttataaactacaattcaatgcactgctatgaagaagaggattcacacattatttcaaatgtaactatatgactattagcctatgctacaaaaagtcaaagctgctagtgattcagggtgggaaataaagtttgcacaggcagtgaaaagcgcaattcctctaaaacacagcagtcttgggacggcggcatcagctggcaggaagccaagaaacttggtatttcatgctaaaatctcccagatggttctctggacctttaagtattactgacatccccgccctcagggccctgccaagtcccttttgtcagctttaaatggtacataaattaccgtaattctctttgtgctgccctgctacagagagaattagtctcagctcaagacagctaaagaagctggatgtcccccatccactggaaaggattcctgagaagacctggcttagttttccctgtctcagcccacctgtggtttcaaaatggcctaaaaagcagcccccctctttccttgccctccatctccccccatccccccttgcccccccccaacccccacactcttcctagcccctggtagccactgttcaactctcgacttggatgagatcaactttttaaacttccacatgagtgagaatatggaggcgggggttagggcgtggacaagaagtggttgattttggggtatgaaagtccagctagataggtgcaatcagttccagtgttcgacagcactgcagggtgactgtcatgaacaacaatttgctgtgtatttcaaaatagcaagaaaacaggaatttaaatgtctccaacacaaagaaatgatgaatgtttgaagtgatgaatatgttaattcccatgatttgatcaatgacacactgtataccagtattgaaacactgcatgtaccccataaacaggtacaattattatgtattaattaacaatttctttaaaaaaacattttttttaagtgaacaagtacaatcacactgacaaaagagagagtctgggctttgctgcttactcaacgagagtcttgaaagaattgtttaacctttcttctgtcttatccgtaaaatgagaatgatgccgatttccctgggggatttctgggattcaagaatgcagtgcaagcaaggtgtgtacttcttcttggcatccagcagacacttgatcaatggcagttgtgttcattattatcctcatggcaacccttcataaaaaccttgtcatgtctgccagacccaggcacattctgccaccatttgaagtattctgttatttcaaatctcacgagtctttataaccaagaaaaactcatctgtcttctctctgactctgcaatttctaactccaattttatctaaaatgacctcttatcttttgaattcccggcaaattttatcacctgcacccttccttctctattgcagtagtggtattttgcttctcttaagtgtggttttcacaaactacttagatgaagaaattgtggatgcttgaggagtaaggtgagattcattaaatttcaagagagtagcaagttgagagtcatgtgaaaatgatagtggcaaatgtggcaaggaaaatttctgaagcagaacccgtcaaaatgccagtgaaatgggcagagatagaaaatgcttaagcacaacaacaaagattaaccagtgcaccagggaaagtaagcaaacaaaacagtgatggagaaacagttaaaaaaaaaaaaagttttgctgcataagatgggagaataagctagtgagaatttcaggagaatttctgtaacccctgaaataaagtaacccaagcatcacaggcagatttcagtaaattattgaaatctgccctcagatgtatgaaagagggtagagtaagtattaaaaaatgagagactgggaatgtaaaagtcgcaatgcaataatggatatagaataaaccagaacactgttagatgcgataaaatgcagaattaacatttacatcaatcaaccaaagatgtgtggagtgaccgctgaaactttgaaggagcaaaagatgaaaagaagatgagagaaaattatagatcactacatgaaagcaaaagatattgaagtttcttgagaaataattatgggcgcagaatcaataattagaaaaataatggaagatacactttcacgactgattaaagagttgagaaggaagataaaagtgcttcattatggcccctgtaaatgaaataaagctgtatgacaataataggaatacgtcacctcacagaattcacactaacaacaccagaagaattctgtacacaaacccagaagaacaagcagattatatttgaggaaatacaaatcaaagttagttttgtctttttttggtagcataacaaaaccgtagaggtactggaccaacaacactatgagcactggatagaagggaaaacgatgttctgcttagtatgtctacttagcaaacaggctattttatgtgagaaggaagagaaaatatttacagatttttaaatgtctcaggtatcgtatcaacacactccttatcaccaacttggctgaaaggtgaacttcaaataataagattaatttaaaaaacagttacttaaggaggttctttacaaatacactaaaaagaatgatctccaaaaagttatgtaaaccagaaaggaagagggttgagtggataaaaatacacgtatgtatatttattcttacatattaaacaatataatttaacaaatgtagaaagggcaaccaagttcctcctggggttgagccctggggctgtgttctcataaggaggtgtctcatcggaggccaggtgataggtgcggcggccagcagaggaagtgccagggaggcagctgaaactcaaggactctgaacacccccagccccaggacgagctgtcagggagacggccctgggggagagggtgcaggtgagccaggctctatgtctggcatcatctgtcacagacactacttaagtgcctcagattcctactacccgctatttctagacatccaaagagacaaggaggcttgccggagtttgcatgctaacaagaacactggaggtaggggagtaaacacgtttttacacatgtgtagagaggagaaggtgccgaatgggtaagtactcacattctcaccactggtcatggccagaaagggggaataagttacttccagtcactcttccaataatgctctatggagcagcagttacacagatactttacgtttcattcattccctcatctttcattcatcttcaaccacgcctctaaatatctctatgtctcccaaaaaagcatgctaatatttttcttaggaaaacttacatctgcatattcagtaagtttctggaataaataaactccgaatttggggtgtcatgaagataaaagaaaggaggcaatgattgactgtataggagatttcgagataattcaacaaggttgctcatggttggcagtgatttacttcctccacacctggattttttaaatgcttttcaaggtcttaaattttaaaaacaccataaaactaaaataaatataaaagtgtaatgacactatttgatgtcggataatttgaaaataaatattggcaacatcacttaataaatgtgttgatgttcacacttaactaatttaggaagttttgcttatctttgatatagagtttctaatatacattttcatacaagatgttgtaagaattgaacaaacgtatataccaagtgcctaacatagagcttggtgtcatggttacagttttacaaatgataattactattattataaaaatcatagaaattgaataaacagaatttacatagtggaaaagtggtgatttaagtggtttagaggggaactcaattgtgaatcatcatgaaatctattttgtaacattaggtaacctatacaatattttttttgtagaagtaaaaaggaaaacttctgcctttactcatctcattactaagaatattttttagcttcatccatgtccctaaaaaggacatgaactcatcattttttatggcagcacagtattacatgatgtatttgtgccacattttcctaatccagtctatcattgttggacatttgggttggttccaagtctttgctattgtgaatagtgccacagtaaacatacgtgtgcatgtgtctttatagcagcatgatttataatcctttgggtatatacctagtaatgggattgctgggtcaaatggtatttctagttctagatccctgaggaatcgccacactgacttccacaatggttgaactagtttacattcccaccaacagtgtaaaagtgttcctatctctccacatccttttcagcacctgttgtttcctgactttttaatgattgccattctaactggtatgagatggtatctcactggggttttgatttgcatttctctgatggccagtgatgatgagcattttttcatgtgtttttttggctgcataaatgtcttcttttgagaaatatctgttcatatcctttgcccactttttgatggggttgtttgttttttttcttgcaaatttgtttgagttcattgtagattctggatattagccctttgtcagatgagtaggttgcaaaaagtttctcccattctgtaggttgcctgttcactctgatgttggtttcttttgctgtgcagaggctcttgagttttattagatcccatttgtcaattttggcttttgttgccattgcttttggtgttttagacatgaggtccttgcccatgcctatgtcctgaatggtattgcctaggtttccttctagacaaaaaaccaaacaccacatgttctcactcataggtgggaattgaacaatgaccaacctccttgtctctttggttgtctagaaatagcaggtagtaggaatttgaggcacttaagtggtgtctgtgacagatgatgcaagacatagatcctggctcacctgcgccccctcccccagggcaggtgagaacacttggacacaggaaggggaacatcacacacgggggcctgttatggggcagggggaggggggagggatagcattaggagatatacctaatgtaagtgacgagttaatgggtgcagcacaccaacatggcacatgtatacatatgtaacaaacctgcatgttgtgcacatgtaccctagaacttaaagtataataaaaaaaaaagaaaaaatagaatattttttaaagaaatactaaacactaagaatgaaaagattcagatgaatgaactgagacacttattttagcgatgtgtgagaaaattttaaaatcactgatttattcaatcactccttcagtcggttttattgtacttccagcttatctattatggaaaattttctgcgagttttatgtcatgaatattttaaaatttaaaacaaataaaattatcattctatttagaccgaatagaggacagaacgcctccgtaatgctccaccacctacgcttttcccattatggaaagagacacatcagctgtcactctcctacactgggaaacggtgacaaaagtgaccagttagagccatgagacaggaatgatccatggacccttgcacataaatttttaaaagtctgagaacttaaagtcctcatgcttagtatttctgagctcagacttaagtgagaatatctcagtgcaaatcccagctttgtctcttgcaagctatctgaccttgggcaagacactgtatcagcggtccatgtgccagtttcctcctctttacctggggacaaaattaatgcgtgctcagtaggattcttatgagaatttactctaagtattcagtagataaggtcaactcaaaagtttctatgtcaagaaagtgattggtttcggaaatctgggcaattagagaaacaatattatctggacccctttacaaacacagagatgaaaggagattaaagcatggacaatgactaaaaaatatatttaagcctttcccccacccatagttatagtaaatcattttacgttcactgtttctttagccaagtcaactttgtcataagaaaaaataatccattgctattaaatacaattttagacaattttctcaggacaatgttttggtgattctgccttctataggcaaggagtcttgcacaagtcgttgaactatttttcatttcagcttcctcatctttaaaatgaagaaggtaggctattctaccaagattgcctctaaattttattcaattccaattttctataactgtttctatgttagaagctatatctagtggatataacagatctaatctgggaaagggaagaagctataagatatcatcaacctaacaaaaagaaaacaaaagatgcttaatcatcttcaactgcagggctatttgcttcctattaattaacagaataatcagagtgatattttgttctagaatccaaggggtctgcttgatgccttctgtcctggagcacacgtctgtcagcccaccagccaggtgtgaggctagctgttcaggaagcaattatcaggttggacccaactctgtggccatggtaaaggggaactcatgccccagtgaagcgatgagggcaacgcttaagttgctggcatttcagcctctcccatgtgcagtttcttacttggtaagtgtgtcaaaaaattgcaaatgcatctctccaattgacgtatacaagtcgcgtatccacttctcccctctacatcagtgaaacaccggtaaggataaagaaaatgaattcattaggagaaagtaaatgattccagcctgaacataaggacatgaattgacagagaatacatatctgtgtatatgcttttgtgaaaacactgaggcaagtagggtgtgctgtactgtggggctggacatcagggagtcggcaggagaagtggccgactcctgccttctgcgccgcgtcccttgcctgcagcccaggcttctcactccacatggcctgcctctgtcttcccattcccgtcacaggaaagagcaacacagccggagcttgggggaggacagtagagaaagcacatgggtacttgaagtccaaatgtcttttgagcgcaggctctgttgctgatttggcctggcatggggtaagttactcagcccagtcccctcaccctcaatatcatcttacagggtctctgaaaatgaggtcttaggaaagaaaatcttagaaggtctttaaagaggtcaaatgaagcaacatttgtcacttgcttaacacattacgtggcacaaaataatgcctcaaaaaatgctggtgactctcttgcagaagaataacatacgataaaaaaatcacatttcagattatgtaagatatagaggcaggattactttttaatgattgccattctaactggtgtgagatggtatctcattgtggttttgatttgcatttctgtaatgaccagtgaggatgagcttttttgcctatgtttattagccgcataaatgtcttcttttgagaagtatctgttcatatccttcccccactttttgatggggttgttttttccttgtaaatttgtttaagttccttgtaggttctggatattagcccttcgtcagagatacatgcacacgtatgtttactgcagcactattcacaatagcaaagacttggaatgaacccaaaggcccatcaatgatagaccaaacaaagaaaacgtggcacttatacaccatggaatactatgcagcaataaaaaaggatgacttgatgtcctttgcagggacatggatgaagctggaaaccatcactgtcagcaaactaacaaaggaacagaaaaccaaacactgcatgttctcagtaataagtgggagttgaacaatgaggacacaagggcacaggaaggggaatatcatacaccagggcctgttggggggtgagaggctagggaatgaatagcattaggagaaatacctaatgtagatgacaggttgatggatacagcaaaccacaatggcatgtgtatacctatgtaacaaacctgcacgttctgcacatgtatcccagaacttaaagtattaaaaaaaaaaattccttaactggcatgttatagatttggaaatgatctgtacctatcctccaaaagaagagaaggtttactcaaaatctgtggccagccaggcacgttggctcacggctgtaatccctgcactttgggaggccgaggcaggtagatcacttgaggtcaggaatttgagatcagcccggccaaaatggtgaaacccctctctactaaaaatatgaaaaaagattagctgggcatggtagcagatgtctgtgatcccagctactcaggaggcaaaggcaggagaatcccttgaactggggcggtggaggttgtggtgagatgagatcactattgccctccagcaggggtgacagagtgagactccatctctaaaaaaataacataacataacataacataacataacataacataacataacataacataacataacaataaataaaataaaataaaaatataataaatgtaatatgcaatttatcgccacagaatttgcgtttttgttagaaagtcaaattaaaaaaaaaaaaacggttgttatatgatgatttttggtaaaagttttcacctgcagttttacagtcacagtgaggactcatgagtttacaacgtttcatttctccaggccccgctccctgggcattccccatcaccgtggatccactatgtggccctagagagttacttttactctgtgatttgacctcctcatatttctcatcctgcctggactgtggccccaaccacgctcatagcaccaaacatgtccttggcagaatttcttactatcctggcacagatgagtctgtccacctaatttaccaccgctcctcgcgggtccacgtgcagaaccatgctgcattctcatcttcagggatggactggaagcattcttgaagatgcagtgctgagtttagcaacttatttgttctatacccacagcctcagcctctcccctaatacagacttcagctcagaaattcaagattactcgtgtgtctctccccatagacaggcttttggtgcacagaatttgatttatgtatttgtaatcctgagcaatgtgcccatgacacctaaggatgctgtaagaggcactgaaagaatgaccacatgaacggctgggctggtgggctggtgggctggtgggtgagtccacagcagcaggagaaatgaaccctctcctccaggagcttactttaatttttttctttttttttttttttttttaagacagagtcttgctttgtcgccaggctggagtgcactggcatgatgacatgatctgggctccctgcaacctctgcctcctgggttcaagcaattctcctgcctcagcttcccaagtagctgggactataggtgcatgccaccacacgcaggttttttattttttactagagacagggtttcaccatgttggctaggatggtcttgatctcttcatccgcccacctcggcctcccaaaatgctgggattacaggtgtgagccactgcacttggtctttttaaggaggaagatgtaacacgtgggcccgttgtataaccatagagagccacagatagcaaaaatatagaaagaagtctccgtccctatgaaaggcattagcatgcttgaaagatcatttaaaaatacatttgaggttttagaattttccacttctaaaacggatagctgtgttttcatggtcattgtctagccctccttggggtgaatgcattgaattattattattatttttttttatatgcctttatggattcagctacaatgcctagactttactctggcaaactttgggaaaaaaatagttacatactaatcctccaactttaataaatcccctagttttcccctatttggaaattattttgttttttgtaagaggagtattttctgagtgaagaaatccataggtaagtcctggctttgtcacttgcccacagatttttttttttttttgagatggagtcttactttgttacccaggctggtgtggagtggtgctcactgcaacctctgcctcccaggatcaagcattctcccgactcagcctcctgaatagctgggattacaggcctgttgtgggatctcaccttgtgatcgtgtgagtcaatactccttaataaaatcctctttatatatacacctatcctgttagttctgtcctttgggagaatcctgattaatacactaatcctacgcaatgccccagaaaacatggtaagacttactgctctgccaccatcatctaagacagtctaccagccaatatgccagcaggtccacaaaatatagacacttggatatgtaagtctactgccctcatagtctgtgtgttagttaccataataggtcagctgcagagtgcagcttcaccaaacacatgagagatagacagcattttaattacgtaatagagtacagaataagaaaactgcattgcagatttggagagaagatcctggagtatgaaaaagtagataaacacacaaaggttataaccacagaataattcaggccagaacataagaaggggccattagaagtgagagtaggtacttgtaataagaaaacagagaaggtagcagattccaatccaggccttctttttatcgtacagaaaaataattttcttataatagcacacagttctcttaggaacaccctgtgttctttagtttttcaaagcatcactcaatcctcttctcttggcagataggaggctcaaatcaatctctccgtaatcacttctgtctcccaggaagctgtcatagcttgttccccaatccctcatgaagacatgctcttgtgtaaaggatactaaataagaccggctttcttagagtctctttcattttctcaggaagccattataaatggtgcaacatagagacgtcctcagtgcattgcagctagtagatatttttggctaggtggctgatctccctggtgatgttgtaagtcttcaggtactgcacacctagcaatacaacatgcaatctcttggaatgattacataatgtcttgcaaatgtggtgttatccccatctgctcacgggtcatccccactgaagaacccaggcttcaatttttggaattgactaaaaatggctttaatgacaatcacttaaaagtaatgtttcacaaataaataatatgttatagttgggggaatattcctaaattctatatttaagtgtatttgttttaatgtgactcactacttttttcagtgctagtcatatataacccaggctacatttcaaattttttttatcatatttgtaggtatcttttgttaatatcatttgaagctgaaccatgatattaatactattttttcagtaaaaataattgccttcataatttatactgcacatgatcctttagtgattaaactgtaacttacagtgggtacctatattattaacacaaacaacatattgctgataatatctaatgactttttaaaaaatcagagaaataaaataaattttattattgtttatatctatatgctaaaggctgcccaagcaaatgtatttgaattgataaatattattggaatatatcaaagtgccttttaaaaacaacattttatactgaaattaaagcctaacatttaatcaaatttataatccatcgactatattcgacatctaacttttcaaaataataatacagttaatgaacattttacacatttaaaaaatcagtcattaatgttataattcatcttgaatacatgcgaaggatcaagaagtagtcatgaaagtcctactctctatgaaattttaaagatttgaggaaattaaatgtcaagtacatttgacatcctatttgtccttaatataaataacagcactgtacctgctttttctggagtatgtggtgtaaataatgatatctgagctgatgctggcatgctgttccgtgcactcacacagctacagatcaccactgtgcaagatcaacaaaaactaaggctctttatgatcttgaaaatgttggtgaagtttagacacttggtgacaaatttgctaactagagatttgcaagagaggaatacacacaattatttccttgtttgttcacaagtaccactggaaaaataaaaaaatggttggcaactgttcaggagaatgagaaagcaggacatgctctcccattgccgttttcggaagtttagaatgtttccaacagaaaacttattactgtggcacgtgtacttggcaggccactggaaatgtggccaacttgcaacagaccaacttggaacaagtcaatcatcacatattctaggccaaaatgaagaatgttattcagcattcattaattcaggtgtatgccttccccattgacttcatttaacaactactttctgaacatgtaggaagtgtcagtcatgacactgggcaatggaattgcctattatacatacggaaagaaaactggacttcagcgtggggaaaattaacttctcatagcatatcttgaaatagtgtttggttacagcagaaggctaaaataatgaatactagtatgtgtttgagtgacgtaccaaactgttcgttgccagtcaatgttctaaaggtttaaaattagtaagtctactcaattaactcaacatctctgtggagatgatcctattagaactccctactgtagaactgggaaactggagctcagacagcctggttacttgagtgtggtctcacagaaagaggaggaacagaatgtaaatctatgcattttgatttcaaagacaatatccttatccactaatattgtctccaaatttgaatataactgtcctggaaagggacattctgcagcacttgcaaaacctaagactcaccagctgtgcataggtatggagctccagtaaatgctaagttctgggattataaagaatccaaagaaggtcaacatagcagatgaatagacttcttccaagttgcaagacagcttagtataatagaaaaatactgggatgtgtcaaaagccctggaatgcagactagttttcaaaatcgtctagccaggcctggttgagtgagtcattggagttgccacttcagtgtctgtgaagaggctgtagtatctatgctactcctctcattacacctttgtgagaagcacatcacattatcaggtcatgtctgcttgaaaatctttcagtggccacagaaatttactcaaagtttaagaggatgtttatttttgttgttattgtttttaattttaattattgtgtttttctataatgtattggggtacaggtggtatttggttacatgagaaagttctttggtggagatttgtgatattttggggcatgcctcaccacagcagtatacactgcaccttatctgtagttacataactaaaagtagaactaccatttggcccaacaatcccatcgctgagtatctacccagaggaaaggaactcattatttgataaagatacttgcacacacatgtttatagcagcacaattcacaactgcaaaatcgtagaaccaacccaaatgcccgtcaatcaacgagtggataaagaggatgcttctgtaagaatgagggtgaaaacacagaaaacagggcactggttaggtgtcatggtgagcaaaggagctggtgtggtgtcagatcaaggggacactggaaccgacagctccagggaaggggcatctggcggccttctcaggagaggaaggaggccatggtgtggctagctccctcctgcagtgtgctcctcatgctcatcccttctcatgcctgtcaccagatgtttgactctctttgcatctcagaattgccagtagaattaataaaatctgtgattagagggaaaacttgaaaagacacagagttgtgaatcacaagagaacaaaagatggaaagaagagggctggcagagaacaggcaatccaagtaaaatttaaggaaacaagcaaaactatagtggtgttattaagtgttttaaggaagctgataaacaatccttagtatccaagcaaagagagtcctctacactccaacctatgcattgatttccaaattgccagtgaaatttgcaggtaaagatagtttgataaaaaatacttagaaaatgtcaggttccaatgtcacacaagtccctgggagaatgggaggagaagtctcattccacactgctgtcctctgcaataccaaatacaggctgagggaataatatttactatacgatttttttggggaaaaaggctttctgaaagaattttggtctagctaacacaatttttcacttgtagacacaaacgaattcagtcacattttttgatagtataactcatagggctgagagattaattaaaatgaagaattcaaggctgggaaatttgtaacaaaaaataacgagcagaattcccttttagtctatgagaagaaacacccaacgacccatcctagaaatcctcaactgcaggcttacaaccccattcttaaaggagatttaaagaaatgtgaagagttcggggcctccttccacagttaatagcttcaacaagtcaaatcttcatgaattattaaacctcatcaataaataatcatataaatcatgtaggtgaacttaagaaacaactctagaaaattatctccctcaagaagatttatcatcagattcaagtgtttagaaaatgtgattataactataaaacaatatgactatagattataactacaaaacaatattaactatttctagaaaaaaaagaatggaaatataccaaaatgttgtatggttattagcgaactatggaccaatgattacttattttttaatctttttgtagttttaattttccttcataaatatgtttcttcaaataagagaaaattatataagagagaattatttcatgcagccaaaagctgacgcaaattcctctggagcttaaatgcaaacctgcgtaccaacatcatataagaaacaaccatttaattgtaaatattccagatgccattgtatttagaaatagacggagacacacaaaaatctgcttttaaaattctgacacatagaaacaatattgcttttgtaaaatctcattggtagactcaacaaagaatcagaaaaatgactaaaatgatcaatgattgccataaagtaaaatgcagtatctatgtgaaagtaaattagaatgcaacaatacagcttttcaaaataactcagaattgggagttaatgtagggtatcaaaaatgaaaggaagaaacaaataaaacaaatgagaaacaactaatcatgccccaaagaataatttaagtaagtagttggtgtggttttcaaagtccttgaggaatgtggagaagaacagttcattacatgctctgtttgttagaattaattactagatggaactagacaccatgcaaactttctataaatcaaactaataaatattattcacatcgccagtcatactataacaagacagtcctatttacagtgagtccgtaagacacttatcctgagagctgttgaatctcctcatattgtcccttttatttggtttcaacacaacaatgttatgtagcacttttaaactgaaatataaatgatctgtttttaaacaatttgcaagctaacttctgtttctatcgcaacattttaaaaatcctcttaaaaccagagttaaggaatttgacttttgtgcctcactgtcccctgtgcaaatatttgggtactgcacaacttaaaaagaaaaacatacctatttaataagctaaaaattccttaatcctgaacacgtgattaattatcactgaagggcaaaattaccaacactttttctttccctgcatataaacattttgtcctgttcatatttttctttctgaaaatacctgagtcttcaaattcaaaaacagcttctactgttagctccaaccccaaataaaaatttatctgcagaaaaagaagtcaatcttgaaagggtttctatggattatgcatatcaattcactagtctggtaattgcatgctggttcatgtaaaagatgaagtttcttgatcatctgagaggaaacacaggctcacaattgagactacattcaaactccagccagcttgtctagtatacagcacagtgtcagaaagctcattttgaccttccccgccatgaggaccaatgagtaccttggtagagactaccttcaaatcagaaagggatgaggcaatgtgccactcagctatctgtagcacatgcatacgaaagcttatcaagcagcatgcaggccatggctgcttcattaatttaatgaataaagtggtgcacgctatacaatggggttgtgttttctgtgatatgtgtaaagatagaaagttggctgtatggaacacttgcatcatttaataataaattaactgctacattactgttacctcttcttaccatggtatcaaccatcccatcaacctcccactaaaatagcaattattttactcaattaatacatttatagtggttttctacagtagtttacttttataaactcaacgctaatataatttcgctgaaagtcaggcacacttttttaaaacttctttatctgtgtgcatatatatgtgtgtgtgtgtatatacctatatatatatatatatatacacgtatagttgtgaaacttgctccacagtaataatagtaaaattctatcatttatgcttcttaaacatacttacaggcacagagaaataatttatatgagaattactgttaagaaaccagaaccgagaagaagagaatttcacttaaattataatttttaaaagtacttcataactatatgtagataagttgattataggttggccagagaggaagcaccataccaaacttgaagtttcaacctcctctattccaaaatgttgaagaactggctttgatatcagtgacataaactgcagaagaatattttgactaataattatgatcctcaaaaataaacacttcaaccataaaaagtatatcatcacatacagctaaaaaagcatatcttaaaaataaaacaatcttaaaatatcaagttactattgctagactgtagtcaacaaaataaaatgtttattatcttgtcaattttatatcatgttttagcttggttgtcaaatcccatcatttctagaagtgcgtacatttaacctttaaaactcacagacaacaccatttactgcttgctcattcactggctgtttcctggttcacctgcatctccgggtcctcttttgtttgtttatttgtttctttaagtctgtttttctaccttctgcttgttgcatggctgcccacctttttttgtgtgtatatcctacaatgacacttgcttatcaccagccagtctccaaaccccatcaccacatctgtagaggaaatctccactaggaaacatcaacacctcaaatacaacctctcccagcctgaaccccacttaggctttgtcacccttgtgtctagcactggaacctcctggtcactgagcttcaacatttgggatgattgttggttcctcctttgctcccctttgtgctccgtggaaaaccatgtgcccatcaaagtcaaagccctctctggagcatccattcctcatgttcttcacctgtcacccctagaactttatgcctccagtcacacacaacctctaattttactgtcattatctcctaaaagtcttcccactttctaccagtcaccattccagtccatcctacacactgaaaatgaatgtatttattaaaacaggttaactctatttttttcacacccaccacccttgcttaaacaccttccctggtttctcactgttgctgatttccccagggattcgtccaatctgcttcctccctgtgctcagagccaagttaatgacttactctctctcaaattcacatgtcttttcacctctgtttctttgctgttggcccttctcccatgatgtcagccctgttgtcttcccagcaacaattcagtgccaccatttccatgaagtcctccttgagcaagctaggaagctcactggccttgaacttcatggcccatagcattgttccttgctgtggtcatgccggtccctgtattacaatgatctgcctgagtatcttatctcatcagtaaacataagttactcccaagttggatctattactgaccatcattgctccttcttggtgtttagctaaatcccttgtacacggagcaaagtacatttacaggaggattaaacagtaaatgttataactggaagtgatgttaaaggtcatcaaccatgaccagaattttcttaatgagaacagtatgcctcaaagatgttaagtaaattctcatttattgtattcccagaacaaaatgcattgaatgacaaagaatggattctctgtatacacaccttcttagctttaagaaatgtatattatcatactatctattctaataccgcggaacagtttgatgccaaattttgtgttgtcaataaaagctgaggcaaacccaattaaatccatattcatcacatattggaaagtacaaaaatgcaattaacaaaactttcatttccacacagtgtaaacaagtatttgcattatctttcatctcaattacattagagtattgcctgtgtgaataatttttctccttatagatatttgggatgtttatctaaattgcattaactttttttaaccctcaattctgtattctttaaactaccactctgactgcaaagtcaaattattcgaagtgttcagcaatgtgaaaaatcgttatatgattaaattttttattattttatcttacataaaatattgcatatgatattactttgaaaacaataatttccattaagcaacagctttttattggcaactacgaagtaagaaaaaagaggagaggaaattgtaaaggatatcttttgacttaacatttaaaggaatgtatgtcaggaacaagtataaaaatatatattgtttccatttcgtgtgggggttttgtatctaccagcagcttcgatttctccaggcaaagagacagctgcatttacttttagatggcataacaatttacaaaatattttgtgagttttgtttactggaacattggtagccccctgagttataagtactttatgactgagaatagagaaagaaatgggaacactactcatgtttcaggcagcccacactccaagaagggtagatgatcacatggcagtactttattgcagactttgtgacatgtgagtttcagtgaggagtagatcagtcgtcccggtacattcacaccgatactgattctgcaccttaatatgtggcattcgggaactacaaagtgctctaccacaatgcccagggaacccaacacatttttcatggttacatattaaattacgtattttatttgacatataatttgttagatatatataattatatatttaatgtaaattatattaaatattacctttcaatatatttatatattatcatgtataaaatatcaatatatttatatattgacaaatatttaaacctgtctactcatttatctattttatatacatacaaaatggagatacatatatacacacacccacacacacacacacacacacacactactcttaaaaataagagttaaaaattgaattcaggtctctaactccacatccaatattatagttacatctgcacatttttcctaaacacgtagaaaattgtcctccttggcattcctcaaagtagatgctgggctacttggaatcaaatacaactgtgtccataattatcccgcatgctatggatcatagtaagacctaaagcatctaccatataggatttaaaataaagcctacataagaataacctatttctgtaattatttttgctttactaaattattttgttctattgtggcaacacagtgtcattctgagattacgtgagatggaactttgagggacaaagaaagctctcaatgagagatcaaagcgtttgcaacctagatgcagaaactgagccctagagagaataaggtgcctaaagtccaattcgcccacctgtggatggctggcagcagaaaggtgatctgacgtgaaaatatgcacacacacacgcacacccagacacatgtgcacacagatgcacacacacatgtacacacagacatatgcacacatgtgcatgtacacacacacatgcatgcacaccgagacacgtgcacacacaggcacagttacacatgcacacacacgtacacccagagagacatatgcacacatgtgcatgcacacacatatgcatgcacactcagagacacatgcatacacatgcacacacacatgcacacacatgcacacccagagacatatgcacacatgtgcacatacacacacgcacatatgcatgcacacccagagacacatgtgcatgcgcatgcacacacttacacatgcacacacatgcacagagacatatgcacacatgtacacgcacacacacatatgcatgcacactcagacacgtgcatacacatgcacacttacacatgcacacacacatgcacacccagagacacatatgcacacatgtgcacgtgcacacacacacacatgcacacccagagacacgtgcacacacatgcacacacttacacatgcacacacgcatgcacacccagagagacatatggacatatgtgcacatacatacacacacacgcacatatgcatgcacagccagagacgtgcacacacatgcacatactcacatatgcacacacatgcaacccagacaatatgcacacacatacacacatacacacccagagacatacacacaagcacacacacacgcacatatacatgcacacacacgtacactcagagacatatgcacacataaacatgcacacacacatgcacacccagaaagacaggcgcacacaagtgcacacatgcacatacacacacatgcacacccagacatatgcacacacaaccagacacatctgcatctgcacgcacacatgcacatatgcatgcacacccagaaagacatgtgcacacacaagtacacacatgcacagatgcacacatgcaaagacatacgcacacacaagcacacacatgcacacacacatgcatacccagacacttatgcacacacaaggacacacatccacacacatgcacatacacacatgcacacccagagagacatgtgcacacacacagacccatgcaaaaacacatgtacacacatgcaccaaagagacgtgcacacacaagcacatacatgcacacacacacatgcacaccgagacatgtgcacacacacatgcacatatgcaagtgcaccgagagacatgcacacagaagtacacacatgcacagacacacatgcacacacagagcctttacaacttcctttctattttaacatcactgtatttaagaacaaatttttggtggagttaaaaatagtaataaacttggtatcatgaaatgtaaaaaaaaaatgtttctaaaaagcacactgtacactcattaggcaccccaggaaaaatgataatgtatgtatcatcaagttggcatttattttctgccccaatcccttggtccaacgccgaataaactctatctgaaaagccaactaaagtgaatctcttatttttcaagctcaaagttacacacatagaaggctcaagccacatacagtgagtcttgagtctcagtagggtcttcttgtctgtgttctgtgtgagactcagccgtcagaaatcattcaggatttgaccttccttaggggagatagcatccctggaactgagggtccttaaaagcactcaggaactttcaaagcaacagaccaggttaaaaaggaattagcatttccagtgagaagggcagcatttcaaaagcactctgggaggcaggataaggatcaaaattctaaggtggatttaatttcaaggtaatcatagtaatatcccaggtactgagttcacaaaaatttacaagccaagccattttataactgacagcaggacatgaagagctatcctccgtgataagaaacgcagtaccctgacactgattttactctgaaaatattggtgaaagcgattgcctctcttgacagttcagggaacaagcagagggataagtctgtcactaggagggcatcgtatcttcaaaacctcttgcctgacattctatcaatctcatcatgatagcaatcaatggaattaaatgctgctctatgtacccagcttcctatgaaccactcagattttaacacctagttgtcgcaatgtactttcaaaggaaatgaatgggaacatcacgttgtaagaatttctaatagaaacttggttgcttaccactaagttgacacacggaaaaaatcaatagccccccaggtctccagaacccccattagaaaatgttattaacttgatctgtataagacagccaactgggcacctaccacacacaaatcgtattacatgcattgttcttaagccttacaacaattcttcagctctggtaaaatcagcacctctctaggacaagcaaacatgggatggagcttaaataatttacccaaattaaacaattaatagcctgggtatatgtagcttcaaagaaccatcaacatgctgaattgtcaattcagctttaaaaacagtctacattctgtttagaaattgaaagtggcaagtttcaattaattcagaaatgtggcatatatcatatttctgacattttctcatcaatcataagactacatcgtttttccttcctgaaccttctatagaatataaattgtcttaaaatataaagctaccaaaagaaaagaaaagcaaatagatataggcaatgtttaaaatatattttttttttgtggaaattggacactccaaatccctttggtgtgagttgagagtaataacgtcttcttcaatcctaaatatatttaaatttttaagtggcctaaagttagtatgcagtttagacacagcagatatattaccagaagctggctattctgtagaatttgctctctggaccaagcatcctacataaaacactcaaaagcaagctcccaggaatgggaacggccccagagtgtcactaatgcatcattgcctgtgtttattctagggcaatgtgtgatcctacaagtattagtaaataatttttccaaggtaccttcccgatcgatattttacactatttgcccggatgcaaaataaaagatctggcttcaaagccaaaattgtcacttcctagctgtatccccttcaataagttacttaccctcattcagtttcccttcctgtaaaacacacttcctagtatttgcagcagacgacgctggttatgtatgtaacaacctgtattctcctttgctttcttatttacccaatcatcattttctttggagaggtaaagtgctagtaattcacattcctaatattcctttcatctaatggtgtccaggggataagatctttgtcaatgagtctatgttgttgggtgcagccctctggagggtggggctatatccttttctggttgcctctccctactcagaatgtggctgggctgcagttgtcgtatgcatgccgggtcagtgccacgctgcaaagaaagcccagaaaatgccagaaggagcccagaacccagaagaagacaacatatgagccctcggatgtctctctccacgtttttataacacaaaaaaataaaattttaatataaaacactattatttttattttccactactcagaaccaaatgttaattggctcctaattggtacagggcgctgatagggaattataatgggagaaatcagctaatctgacatcatattcatttcttatttttaaaggcactcgtgccctttcaaaaagccattctaaaaggttacatagtgtatgatttcgtttgtataacattcttgaaatgacaaaattatagggatgggaactagattagaggttgctaaagattacagtctgtgtgggcgagggtgggatgtcactatgaaaaggtttcccaggggaggtctgcctggtgagggagctgggtggtatctcgattgtggccatggtcacaagaattgatacctgtgataaaatcgcacagaactctatacacacacacacacacgggcatctaagagtccatgaatctggtgaaatctcaaaccaggtctgcagctcatccccttgccaatttgctggctctgcttttggcttagagcaatgtgacccttaccactggtgggaggggtgggtgaaacgaagacaggacttctctgtactgttttattcaaccctttggatctgtaagtatttcaaaataaagttacaaaacatcctgtttaataacagtagatgtgcatctcttaacagagagatacatttagaaacaggtttctcagcctcagcaccacggacattacaggctggctaagtcttggttgtagggcagttctgtgcaggtcagtttatctggcagattctgtggcctccgcccaccacacgccagtcgtacttctccctgggtttctgacaaccaaaactgtctccagccattgccatttgtcccctgggtggcaaaatccaaaccacccccatataagaaccactgatacagggggaaatgaggaatactggaaagtgattctttattttacaaagggagctgacatagaattattttgcatggttaactcccctggtagaatcaaagtttgattttgttgcacaaatattaagtactgcattttgaattatgtgttgtggaaagggatagacacatctcaaatcaccaggttcttgtatgccactgaggtgttttgctaatagctcagtgccaaaattcttcccctctctatttataccaaaggaaaggtgacaggcacaagagaatacaaatatctaagagcacttgtcttagcactcgtgggggaaggaggatggctctgtatgcaagtctagccatgcctgcttctatgccttgcttcagcttccaaaccttgaggaagaagacatttccttaggaaccctgtgggctcttcttcctgataatcacatctcatttccataaaattaatcaaacaaagtgttttggttcagtaaactgtatacaacacacaatttgaatttcaaaatacaaatttatattaactgactaattaaatgtcttgaaattcttcttgatttctgggacatggtggctgcacctcacacaaaaatgtcagtgcatatggaaaagcttgagggattggaatagtgaatgttccaattgctgagactattaatttcctgcaaaactgaaggttgacagacagaaaacacctggataaaattattactggaaatagttctccatttaaacataagaatgccaactaaatgagttttaatactctgtatgtattataactgtgcatttcatttgcatttatctgcaaaaatatgataaataatataatccttagataattacatgccagtgaaaagtatgacagttgatatacatttatactgacatattttcagaagcccaaaatattatcaatctcaacagagctttcgaacaaggctcactttagtacaagctgtaacacagacactttcaacagaatataccgacttctttgaaaagtgaactaatcattatttcattaaaatatccaattgtgtagtaaagacaatacatacgctactgatttaggtcctactgtttgaatcagactaccaaagtcaagagttgtgttattaaaatgcaaaatgccagtagctcatatttcaatgcaagttcttttccatgatttttttgcattaatttgaagaatgcaaaataagcagctttgaagttgcacatggccaacacacttaagtgtactaaatcaattcaagaaagagtaactccctcttaaaataattgactatattgaaggagatggggggttgatacatgaggaattcagcaggaatttttgtaagacagaatcataaatttgggttaaaggaagaaattgggattatgtgactctggctctaatcatatagaggagaaattttaatgccagattatttaactaccttttccaagaccacacaatggaagagtagaatcacaggaatgcgatgcacatcttctgacgcctagttcgtgatttgtcaaaagtatagtgtttgctttgaggaagagtatcagcttctcagaagagcttactaagcaactcatatgtacaaatacatcttgggagatatatctgttgttttactcacaggaaacggaatttagccatgcaaaatgcatcaacatacttcgtttcctcttctgagcaatccctcctggaattttcccactctcagtgatctgtaagcctacattttcttggacaataaattaattatagcaagagagaagcagggcaagctgcttatggaaagccgaggcctttctagtcatagaatcaacatttgtaaatatatacacaataaatttgcccacgaaatgatgtgccatatgtcatttttgtttccccatgacaatttaattttatcagtgatagaagaatgagccgtgagtatacatgctaaatgctcagtctatgaccattttcataatccatgacactaaaggtttcaattttattgatcttttcaaaaagcaacttggtttaagttcattttctctgttgttttctctattcatctctcctccaatctttattaattccttctttctgcaagcttcagatttagtttgctctttttttatagctctttaaaatatattaggttgttgattcaatatcttatattttaatgtgatggtttacagctacaaatgtccctcttggccctgttttggctgcatcctgtaagttttggtatgttgtaatttcattttcatttgtctcaaggaagtttccaatttcccttgtgattttttcttcgatctaatgattgtttaggtgtgttgtttaacttccacatatttgtaaatttcctagctttccttctgctattaaactaataaaagcaaaatgtacagtgaatcttttcgttttgttttgtttttgttttgaggtggagtcttgctctgttccccaagctggaatgcaggggtgtgagctaggctcacagcaacctctgccttctgggttcaagtgattctcctgcctcagcttctcaagtagctaggattacaagtattacaggcacccgccaccacagccagctaatttttgtatttttagtagagacagtttcaccatgttggccaggctggtctcaaattcctgacctcaggtgattctcctgccttggcctcccaaagtgctactattacaggcatgagccaccatgcctgccctgctgcagtgaatcttgacgcctctcctttttcctatttttttttttaagatggagtctcattctgtcatccagactggaatgcagtggtacgatctcactgcaacctccacctcccaggttcaagcgattctcctgcctcagcttcctgagtagctgggactgcaggcacacaccaccatgcccagctaatttttttttttttgtatttgtagtagagaaggggttttgccatgttggccaggctgatctcaaactcctgacctcaggtgacctgcccacctaggcctcccaaagtgctgggattacaggtgtgagccaccacacctggcccatactactttaagaaaataagcataatttctggagattcacctaatttaaaacaacctaaaataacttttcaggtccctcccatttcctctggcttttattcaccatggatattaattattattatttgttgttgtgtgagtactagtaatcaaaacctttaactaaaatcttttttagcccctatccgacttatgcggcatttgctcagatgtgttttcattatagaatctggaattataaaacacaatagtaacattattctatatgtgataaacatcacccctcaaaaaatcaaatataaaaggtgatcctgtcattgtgagattattgaaatgccccagggtagcataaagaagaaggcagtgagagggaggcagccagaagttctgggagccctgccatgcagtccaggttccatctgtggtctggccccgtgggaggctggtccactccaggttatgtgttagcataggtgcaatacaggaagtagaacaaaaactatttatgcagataatgagggcaaagagtcctcagcagaacttcccttgtaacacaaaaaaaccccaagaaatcacttcttttctaacaaagagcagcctggaagatcgggctgcaaacatagataagcaagctagaagcttacacagggggatgccagcagttgcacagagagaaacggctacgtggggccaggccggtccaccatggggccccacctctcccctaatcagcacatgcacagtaagaaagaaatgagcaacatgcagtagcttaggctgaggacccacctgcaaaataaaagactggaatgggggatcccacagattcatgccctatgcagatggcacacctggtcctaaacagtttttcatgccctgtctagatcagatactgcctcatgattagctcgtctatgaaagcccctacattccactttgagatggcaacattttttttctgggactcctctctggagtagaaaggtgttcgctttgtttctcctatgaaatttctgctctaaacctcacccttagtatgtccgtgtccttgatttccttgggtgtgagaccaagaactctaggtgtcaagccagacaatgaggccacttcacatgattctgcatggtgtcactggctggctcttctgggacatcagccagggttttaagaatctcctggctattggcacacattttcacaccaatctgtgtgtgtatgagcgagtggtgaggatggtgagctagaagaaagatggacttgtggcaactctcctcctccttcctaaaacagctgtgtctgacatttccttgcctggtttttacctctcctccatatcccaaccttcccctcagatgatcaggactttagatcaccttatttgagaaatggacgtaggttcaacacaggatttgatgagtgattgcattcatgccgtttggtgttattgtagatttactacgccaaaattttacattctattactctgaaactgatctgcaattataattataaaaaataatattctcatccttattccaaacaatttgcttaaaataacactttcagtatgtcatatctattgatcaatatatagacaacataataatggtgaagactgtaaacttcttgacatataatctatatctgattcacatttgaagtcattaaagcacacagcacaatgacctacagaaaatataatttcacactgagatctattttttaatcaatagtaaatcattactaaatataaaccatgacatagcacatatactttcaaagtattatcatgtagagtctcatacaatcacctcattttatacattcccttctactcataacaaattaagtgaataatgtgttttaagggcaaagatgtctaaaatactttgagataaacagctcgtaattcatccaatgtacctttccatcaccatcttggcatgaaggaaaagcatgaaaggacttatttttgcagaggaagaaatttaaagatcaaattctgtgccaaaaattgtacacaaagaaagagcaccctaaaaccagatgcctattttctgtatttcattatttttattgataaggatagattacatgacatctacctcttacaaatgtttaaatgcccaatataatataattaactataaaccgagattgtacagcagatctctagaacttattcatcttacataagagaactttatactccttgaacagtgactcctcatttccccctccctgataacagtggtttgactctgtcagcgtctatgagtttaactcctttagattcctcatgtaagtggaatcatgaagtatttgtcctgtgagcagcttacttcacttagcatcatgtgattcaaagacatctctcactactatgtctataaagcaggttcacacactgctgttgaatgagaatctcagggaagcccttgcttccctgaatccactcatctgcatctggaatctcccagaggctctgggaggcccatgagcttcactccactaacacttatttcaccacacgtgcctccaccgtgatgtatcatcctggaactcagtactaagctccaaggtgcttgaggcatctcttttactttccttactcttgtaactatcacaaaacctggaaaacatgaaagttcactttttttctcccaagtagctgtacagttagagatcttagtctgtaggtatctacaatcgaaatctttcagatgtatcagctcgtcattcaccaagaatccctttggtccaccaatcacatgaactctctaaggataagagggcacatgaaacaaaattttgttttggcaatatttatattttaaatctacttttgcggaagaagaatattctatgaataaaagtcattgcttgaagttactagttttgacttcctttgaaatgattgttttagtatctgaggctatgagagcccatattccccgctctcactcatatgcactgtgaaataacaaatacccttgaagtaattccatctcttggtgtttcatcacttactcactcctgcaatgccacgccctttgcctaggtagtccagaagatctgcattcaattatctaactcacttattaatctttcttttgaaaatttattaatttccttcatctttaccttgatgtaagctccttggagacctgttttccacactcctctcagttctctttaaatgccgtgttcaggattgctttgtagactcagtttaatgcctcttgatcttctctcctttgttttgggcaaagtgcctatcagcatgtgaggatcacacttatgacaccctctctcatgctcagcgataagtagatatttttggctttctcaattacaaaaaaaaaaaaaaaaagaaaaacttttcaaaaattagtgtacaatcatttactttcagtgactgatctaaaagttgtgtttcctaagggcttttctgctagatgtcagttggtatcttgggaatgccatttccatagccaaacaattttagaaaaccattgtgtacatcctttttcattcttctagtcccagagcctttaagcaacaactgcataagcatccaggttgagcatatggcatcttaaagctaagattactttatttccttgttacaaatttctcacacaacattttctttgggtcacattttgggaaacgttgctcttttgcctagatgtattcatcaaccatctgggagctacttggtacaaatggtttagtccagaattcaagtaaaagatagccagggttactgtaagacatgtatttacttatttatttatttattgacagcatctggctttgtcgcccaggctggagtgcagtggtgcaatcagaactcaccgtagcattcaactcctgggcttaagccagtctcctgcctcagcctactgagtagttgggactacagggtgtaccaacatagtcagctaatattttttttttttaatttatatagagacagggtctcaccatggtgcccatgctggtctcaaactcctggcctgaaatgatccttctgtttcagcctcccaagctctaggattacaggcatgagccaccgcacccagccactgtgggaagctaatgacagacgacactgaaatagttattcaagcttttggccgtactttctatctttctatataccatgctgagtcactataggaagaacctgagtccagaggacagaaatggaaataaaagtgtgaaccctgacacctgcagcctgacctcaaggggtcttccctccggttccatccacattgctgcaaaagcctccatgttctcacttataagtgggagctaaatatgtatgcacatggacatagagtgtgacctgtaagaccacggagacttggaagggggctggtgggtaggaagaagaaggatgagaaattacttaatgagaaataacttaatgggtataatgtaccttattcaagtaacagataccctaaaagctctgtcttaaccactacaaaatctatgcatgtaacaaaattgcacttgtacccctcattgcttttttgttaatccaagtaaacttgattttaaccttcaattatgtagtgcttggcagttcacaccttcccacatgctttgaaaattcccaagggctggattccttgcagtttcctctcccaccagtttttgtatatgaagtgtggtatttggccctgttgtaggtagaactctaggctggccactaagcttccccctcctggtggatgctgcttcaaggctagcaggagaagcccccaccagtcggttacagttatatgacagagggccatccagggagggactctcccagcaacttgaaacaaaaagtgacctcctcaagccagcgaccacgctgtcatagtcacaggtcctggccatacacaagtagagatgtccccaagtagctgataaatattatcattgtttttatgataccaagctgtgatatccggatcatcaactgtcattacataggagagcacggggctttcagcagacgtatccagagcactgtaggtttgcttttcaagactcgaagcatcaatattaatttataaatgagctgagttaataagtttgtgtgtatgacagcaacttgtacttaaactaattattttacaacatatttaaaatggcagcctgtggcttcaattaatgttaacacttaagtgagggtgtcagaattccatgaccattgattctactacgtgcaactgtagaggaagaatgggcttagagtcagaaagcaggttcaccaatgggctgagtgaagttgggccaggtttcctctttgattaatggggattatgttttttcctctccagggtatcttcgaggattggcctccatgagaaggatgagcctggttcctggtagaaattcagtacttggtagtcactgtctccatcatgaatagtgtgaacagaaacggtaattcagaagtgtgagctgtcactaccatctagtggcagtggtcagaagtgtaggcacagagcaataggatctgtgccctcagagcagcctccctcctccggtcttgcaggtggcaggagccccaatacccaaaagtgtccattgtgtggaagggactaagtcatctcttcagcaccgggaatgctgttaggtttgtgccatccttgggtgttcggtcccacggtccgtgttctgtggctcagataagaatcccaggtagagaaaattaaatctagtttagaaggatttattgtacgattgccctagtcgtcagtagagtcagtatttactgggagctttcacatgcaacattgtgcaacaataggtcaaactctttttttcttttctttcttttcttttttttgagatggagtctttctctgttgccgggctggagtgcagtggcactatctcagctcactgccacctccgcctcctgggttccagcaattcccctgcctcagcctcccaagtagctgggactacaggtgcccgccaccacgcccagctaatttgttgtattttaagagacaggtttcaccatgttggccaagatagtcagtctcgatctcctgaccttgtgatccacctgccttggcctcccaaagtgctgggattacaggcatgagccatcatgcccggcccgcaaactcttgcttatatgactcatattcctatcacctgtatgagtttttattgttgtttagtgtactttttttatacatcataagttatcatgcaacagacacaaatactacacctgttgcattccaaaaattgatatgttagctaattgtaacataataaaatatgtaaagtgatttcctcaggaatttaagacattggttcataaatgtttggacaaaccccctaaaagaatccttcttttaaacattaatatttgcatgtttgttttagatagctctattattctgataatgtaatgatggaaattgtgtttcctttaatgaaatttatgtagcatcatttatttcaggcaaattacatatattcatttacaatactttgtatttgcaaaaatcatatatcacttcatacattatcaagaatcaaaagtttttaactattttatttaggacagtaaaacaagaacacttcaccaattaaagagtctcatccatagcacttggcacaaacttggtcaaatgttacagacacaataaatacttctaaattaattcaggagcctcttctcccatatttcattgttgatgttccttttacttctcttggatagagaataatgagtgtttctcctattaaagttgtttattcactcagggtatcgtttattcttctatttatcatatcctcattagagaaagggctttcctacaagactgtggtaaacccttttatgctagatgtgcagaacctgatggtcaatgacccgatcctatgcacagagtttttaaaagagtgtttcaagtttataaaccaaacgattgcacatggacttctagatttacatctttacttgaaaaattacatgacggatcaactacaccttgcatttcattcccactagcaccatcagctggaactgagtagcaatggcacacctgagatgcctcacctgagatgcttcaccttcagtggtgcacctgatatgcttcacctgagatggtacacgtgcgatgcctcatctgagattatgcaactgacatgcttcacctgggatgatgcacctgggattccacacctgggctggtgcacctgagatgcctcacctaaaatggtgcacttgagatgcctcacctgagatgatgcacctgagatgcctcacctaagatgatacacctgagatgcctcacctgcgatgcctcacctgagatgccccacctgcgatgcctcgcctgcgatgccgcacttgagctggctaacctgagttgcctcccctgtgattgtgtgcccacaaaagtgagccccattccccaccactcaacaaaggtatagagctttcctctttttgttgccagactggccttttcttccttagcaacgtggcatggcctgccatctttgattgccccttttccgtcacgtgcacttgcgattcatcagcagtcacacagctctacatgtatcctactcgggaagccacacttctccacttgcaccaagagcctggtggaaggcaatgtctcctctcacctggagtgctgctgcggtcttcctaagtgttcctagttgttctctgctcccactcttgcttcacctacacaccatgctgcacacagccgccagagcaacgtttgtgagaccccaatgtcatcaaagcatctcccttctagaaatcctgcagcagcatctcattgaagtgaaaataaaatccaaacacattaggacagcctgaaacacccagagatggcctctcctccatcactgagccacgtctcttacagtcttgccccagtccctttccctgcacccgcggatagcagggaccgcttgtctttcccttccacataccaagatgttctggccgcagggctcttgcatttgctgtaatttaggtctggaaggatgttcgcaaggctgcctcatgtgtatcattaatccttcagtcactctctcctgggcggatttagattaaatggttgtcttccccctactgcctacctcccacccccaagccaatcccagctctttctctactcctggttttgccttctgggcaacacctttactataagaagtatatacatattatttgtttccaggctaatgccttcacccattagattatacatcatgatgacagttgggtttatgtgtgttctaatctgcatctccagagcctaaaacacagctacacatgtgcattatattatgaagcccacaaaggttctcattttaaacgtgcaaggaaaagcgtgattcagaagttgtaacacttcgccaagaattgaagcgaaacacagctctgcccctctaaatcccagcaaggctccctcccccatccctcactgttgggtgaccttgtcacccactaagaaccaaatcaagtgtgggataacagtgtttaaaattaaaaacatatcacacattgaaaacaagaatctctagccctttctttatgataaaaaaaaaaaaaaacacaagaaagaaaatgcctacaaaaaaggaaagaaaactctagacgtgttaaggtgccgtggaaaatctggtggataattttgttcgaccaaacgaacttagaaaacggcttccctttgaatttagacacaattgcttcatggatagaccataacttctctgtttcccataaattgtagctagtttgagaaacagtcttctaaagcctgcttatatttgcatctccagtaaaacagggctgcttctgttgtgtctgctgctgtgtgcaccacactgcaatctctgattggctcataaataggcttctctgtgattctagttgcttgtagacttgtttacggtcacagtttcaatacttggaaattaaactgaactgagtgtaacacagtgacagtttagtcttgaaaaaaaaccttattccaatgttttaggcttattaaacaatgaattttaaccagcacttcctgattcaacttacttgcaaaacaacctcctcatttggcaaacagagttgaataggtgataactcttcttagaaatacctggaaatcttgcatcacaacagtgccctatacagaatctcctttaaaatcaagtacagctcaaggtggattcaagacttaaatgtaaaacccaaaactataaaaaccctagaataaaatcaaggcaatactattcaggacatagtcacgggcaacgaattcatgacaaaaatgtcaaaagcaattacaacaaaagtaaaaactgacaaatgggatctaattaaagtaaagagcttctgcacgacaaaagaaactatcatctgagtgaacagacaacctacagaatgggagaaaatttttgcaatctatccatctgacaaagggctaatatccagaatctacaaggaactcaaacaaatttacaagaaaaaaaacaaacaatcccattaaaaagtgagcaaaagacatgaacagacacttctcaaaagaagacatccatgcagtcaacaaacatgaaaaaaagctcaacatcactgataagtaaagaagtgcaaatcaaaaccacaatgagatcatttcatgccagtcagatcacaattattaaaaagtcaagaaacaacagatgccggcgaggctgtggagaaacagaaactcttttacactgttggtgggaatgtaacttagttcaaccattgtggaggacagtgtggtgattcctcaaagatctagaaccagaaataccatttgacccagcaatcccattactgggtatatacccaaaggaatataaatcactctattataaagatacatgcacatgtatgttcactgcagcactattcacaacagcaaagacatggaatcaacccaaatgtccatcaatgacagactggataaagaaaatgtggtagatatacaccatggaatgctatgcagccataagaaggaatgagatcacgtgctttgcaggaacatggatgaaactggaagccattaccctcaaagtaatgcaggaacagaaaaccaaatactgcatgttctcacttataagtgggagctgaacaatgagaacacatggacacagggaaaggaacaacatgcactggggcctgttgaggggagctggggagggagagcatcaggatgaatagctaatacgtgtggggcttaatacctaggtgatgggttgataggtgtaacaaaccaccatggttcatgtttaccgaaataacaaatctgcacctcctgcacatctattctggaactcaaaataaaaattaaaaaaatatgagaataaattaaatatatataataaaaaataaaataaaaataaaatactctaaaaatgggtcatgatttttacaggtagacgttcttcactaatcaaattaatcaaaatattttatttggacaccctataattagtactagttcagaaaattcatttttctttatcaacaattaaaaattataaaatattatataaatatatataaacaaaataatatcaactacagctgttctttttaaaaaacaaaaaatttgtgctgggcatgatggcttgcacctgcaattccaacactttgatgttaggagttcgagaccagcctggccaaaatggcaaaaccccatctctactcaaaatacaaacattagctgggcgtggtggcttgtacacccaggaggtggaggttggagtgagcctagatggagccactgctctccagtctcggcaacagggactccatttcgaaaaaaaggaaaaaatatttgttgttaattatctacttccacctatgtgcacccgtattatttattttactgtgctctatagtctttaaaaaattcaacagagactcttttatttcctatggaaatccctttaaagttacattattacaaaatacttcaaaactaagagtcttgcttgaccttaatattgatacttacctcttattaatcaatgactatttgtgacatactgtcataaattctttactcttttatgtcatctgaagatggttcattcattcagatggttcattcagaatcttcaatcattcagatggttcattcagaatcttcaattctgaagataggtaattagttattttattttacaaatatattttagcacctaccctgttccagataccgttctacgattggatgtgcgttagggaatgaaactgacagtctctgaccttgctttctttctcaggcagggaaaaagcaataaatcagtgactacatcctgtgtcagatgctggcagggactgggaaggaacacggaacagggttatagacaggaaagagcgtacgtgctgtgagcaggcctggcctccttgaattctatgctgtatggagatacataggaggtaacacaggacagttcagatgtgtttctccccctattcttgctcaaatgtctcaagaataactgtcaaatgtgctggggatgctgtaggttgaggtaagaaggagctgaatggaacagcttggactctcttccagtctttccccaggacaggatatccttcgatgctttagctaagcaagatccataaccctggggtacaaagcccagggagagctgctttcccgtgtccctcagctacggtgcaagtggggctcatgcggtggagacaccgtcctccccaggcagctctcctgagacttgggggacccgctggcagtgaatatggggctcctcttcctccctgctgcccatctgtgagtaaaatcccacttcatggcacctgctgtttgtgggtgtgttctgtctcgctgggctcagacaagttgacaaccagtgcaaagggaacctgcttcatgcatcgtgagcaaatctgtgcatcctgaaggatgatcccagacagagagaaggacaaaagtcaataccctgagacccaggcatgcttgatgcttttgagaaactggtaagtcttagcagcaagggaggtgggagaagcccaggatgtgacgtagagcagaggtgaggcatgttttacagaggacatcggagaacattattagaataatttatgtttttagggagtgaggtgaaaagtcactggggattttgagcaaactagagatataaactgacttttgaaaataatcactcgtttctgtgttgagaacagaatgaacaggggcaagtgcagaagggcagaaatgagttaggagagatttgcaataatctaggcaagcagtgatgattgccgagactggcaattaactgtggaaatgggaggatggctggatccccaacatgatggaaaatgaacagagtgtatgggtctgctgatgaatgtggggtatgagaacaaaagaaggattaaatataagtataataattttcagcctaaataactgaaaaaaaaaaagaattgccattttctaagaagaaaagagtgtgagaggaacaggttttgtagaggagacccagagtttgcttttagacatgctgtgtttgagatgtctgttggacacttagtggagatgtcatgtggacaattcactgtttgcagtctgagttcagagtctgaataggaacattttggtagaggttagcagatggattgtatttgaagctgcaggatcagagtcaggacagatgaagaaaatgaggatgtggaggaccctgagaactccagtgtttacaggaagagacaggaagtggccaaagcaaagcaactgagaaagcagaaagagtcagataggaaggggatcaagaagcagagtctaagtaggtaataaaacagtcttccacaggtgaagtgtccagtgctaaccacaggccaaggtgtgagaggtgtttgaaccagagcgactccatcttgagtgagggcttggtaaaacgagcctgggacgtgctgggctgcatccctagaaagttatgtattcctagcctctagaggttcatggttaagggaagagattgataacgtttactaaacagacccaaaattaaaagtgccccgacatcctgataccttgaaaaaagagcgttcttaattttgctttaaagaaaataatatagattcttgcaaaatatagtaattcagaaaattaatcctttatcacaaacccttgtagcaaagaacatctcccctgatcttttttcatcctatatacgaacaagcattttacctgggatggaggcgttctttctcttactctcgggaacgccttactctgtccatggagtagcttgctctttcccagttgacgttctgaataaacttgcctttgcttttgcactgtggactcgccctgaattgtttcttgcatgagatccaagaaccctctcttagggtctggattgggatccctttccagtaacaaaggcgggggccctgggaacggaccgtccaatctgacagcttggccaccactgcagacttgcctggagctattcagtgggcaggagccacagaagcttgactagacggggttcagggagaccaggatgctgggtggagacagggaatggagccaaatcttagaaatgttgtttgcttttctctaatgagaaaagatatgaagacaagcaggagatgacaagacacgtgctagtccaagatgccttacagctatagtaagtaaaatgtcaatatggttatttctatgaattaataccaacttaatgtttaatctgaaagtatcttaaatatcttagatctcttctttctcatgtgtcaacttgatccttcatttttgttccttttatgaaatttctctcagggaaatttatcaggacagtataaagttaatttcaaatatggtatttcctgaatacaaacttttccatgaccttaacaaagtataaaacctaggacaggtatcaaagcagatcgtctctctctttctccgtcattacttgcaatctattacagtaaaggactctacacttagcaaagagcaggaggtagaatattgtttccatgtgtctgtctatatgtgtatatatgtatgtgtctatgaacttttctgatttaaagaaggacatggtcttcatgattttcaaagttgcttttatccctagaattctctatagtactacataaactggtagctttattccaatacttaacatattcttctacaaaacagctgtaaaacataaacagccattgtgatgtctgatggtccaaggtggccatttctgaaaagcaggtgcaaaacagaaggtaaattttccaggcctaggtctacagacaattttgaagaggtgagtgataaagaatcatactgttcggtataatttcaccactctaatgtgatgtagactacaaatgaatcctgtctttaccatgaaggctacttatcatgggctctccactgccgtaacccaagttgagcaattcaggtgcatcatcagcggtggacaacttacagacactgcctttggcaaaattgaggacacttaactgcgaatcacagccatttgacaagtaatggtgctgattattttaaagggctactggaatctcaaatacagataagcttttgttaaaaaaatagtcacattctgtgaaaaggctcaggaagcaagttatttagtagcagagtctattggccacaaaaagcaaagtcaagcagttggtgcaaacttagtgatgtagcaataaaattatagtgaatgcatagtggggaatgctaggacagggtgcagtgggagaaactggaaaggtttagctcctaagccaaacaattagtcaacatattgatgagtcacatgacactgagaaagatttctctaataaaccaaaatgcagtttctccatcaagttgacatttaacagcccttgctaacaaatgtaaatagcagtaaaatccaagaaaatatgttttgctgtgcataggtgtctcaactaagcaaaggtcatcatgtatttgtttgtcttcatatatggaaaaaaacacttcatcttagagaaattgtgtaaggttctatgcagatagtgccctcaatggctggccacgtgaatttttcctctattattaaaaaaaaaatcccagtactttgggaggccaaggtggggggatcatgaggtcaggagatcgagaccatcttggcaaacatgatgaaatccccatctctactaaaaatacaaaaaattagctgggtttggtggcatattcctgtagtcccagctacttgggaggctgaggcaggagaatctcttgaaccagggagtcggagcttgtggtgagtcaagatcctgccaccgcactccagcctggtgacagagtgagactccaaaaaaaaagaaaaaaaaaaatcctgatactgtcaccatacattgttctcctcacagtactgagcaattgtcaaaagttttgaataatactgcaaaatgattaacattataaaacaaaaaaaaattactcatcaatgggtaaagattgtataaacagctggacaaatcttcaatcaatgtaggaattactgaagataaaaggagctgcagaaatcagcctgcacagttgtgtttcatgacatgaactttttgaacaggattctgcagctccctgaagaacatcatttacttccagtgatgttattactgaaatgaaagggaaggtgaaatattggaaaaacgatgttgcaagggaaactgtgaaaatgtttccactgctgcttgagtttagatggagggaggatatcagaggtcttgagctgttttgaaaacctcctggaagaagggaagagcaaaactgaacagcgtctcccctcctgtccacagatgtggggctggtcagggccccttctctgaatctgctgtttagctggagacctgacttagacagcaggaccaataacgtgggctacaggttggccaaccctcatgctgccattcacacaggctcctggacaagctctgggcttggcaaagatgaataccttgtcttacacaagaaaacagggccacatggctttgacttcggccttaaataagtgagcaagcctcttcttgtgttatgagcaccaagaacaaagacagaaagtcatactcgacaagaaaatgaaatgaatgtgtgcttatttcagtttctaagtgagaatgtaaaatttgtacggtcgaaaaatatcaaaaccatttagtttccacactgaagaggtaaaactgattcagtttttaaaacactacttcttgtacatatacagatgtataaacggatcagtaggtcaatgattgtccgtaatgttttccaacttctgagcatatatttatgcctgatcacgtctctcaaataagaaaatatttttccaaagtctcatacaaaattgagttttaggctttatttttatttacattgctttactatttaaatattaagtttactattttgtattgttaataaagtgggtttgtaagtaatattaatttaaatatactacaacctttctttggagttaaatctactaagcctacctatatgaaaaacaatagatcttattttggcttgagctagttatctaatagaaatgtgttgtgtttttcttgttgctctttaagatttatgaaaagaaaataaaatgattaaagacatgcaaacaaagttttttaaaaggaatttcgctaggtcattttttaaaatgtcattttaagaataagaagtactcctaaaattactacatgcaccatgccatatcctgatgtcataaagtagaaatttgcgatacaacttcaacctatttggatatggtaaagaaaaaaataactaaaagaaaggaaatgagtttataaacttcctggagaggggtaaccaccccatgaaagtaggacagtattttgaccaaaataaataggtccaccaaaaaaaataccgtgctcagaagagcactgataattattgctgtatgactctatcggtacatgtaacaatgttatggggggttcctgcaacctaggattcctttgccttcctcaagccacaagggctgatggagccatctcagtgcccagttctgcccttcctcactctctgtagcccttgtctattttaaaatgcttatttaattattattttttatttccataggtaattggggaacaggtggtatttggttacgtgatcgagttcttcagtggtgattcgtgagattttggtgcacttatcacctgagcagtatacactgcacccagtttgtagtcttgtatccctcaaccacttcccaccctttctgcctgagtcctcgaggtctaccctgccactcttatgcctttccatcctcatagcttagctcctgcttggaatgagaacatacgatgtttggttttccattcctgagttacttcacttagaataatagtccccaatctcatccaggttgctatgaatgccattaattcaacccttttcacggctgagtggtattccatcatacacacacacacacacacacacacacacacacacacacacaccatggtttctttttccactcattgattgataggaatttgggttgtttctaaagagtaagcccggccaagttgttttcatgcttaaccaccttctcaggtttctaagccctttcagagcaaagccacccttgctaggagggcaggcagggtgctccctgggctgggtcccgctccctaccccgagtccacatcctccccttctcacctggtggtcacacacactaagttctcgcgtgttcctgtgcctgtcctgtcttaactctgctcttgcagacacccctcccaatatacctgggtttcctcaccctctagccttgtttcaaggaagacctgctcctcgaagccatccctgatatcaaccccacttccctctgctgaagcctccatctcagagccacacattgccatgcagatgcccgcttccatgtttgctttgcttctagattgggtgtctgcaaactacagctcacggtccacatccagtctgtgcctgttttcttggtaaagcctcataagcatggtttctatgttctgaaagggttgtggagaccacaaaggcgaagtgtgccagtgactgtgtgtcctgcaaaatctaaaccatttattatcttgccctttacaggcaagctcaccagcttctgttctaggccaagtggtctcagatagacagatctaggccttattctactctggcctgatgatgggaggctatgctttgaatgtttatggcctttgaggctcacatggaaactcagcccctcatgtcgcagcagtgagagatgggaccattaagaatagcttgggtcgtcagggctctcctttcttggatggataaattcattcatggatgaatggattaatgcattaatttgttaatgaattactggattattgtgagagtgtggctttttaaaaacaggaggagaaacctcagctagcatgatgggagaaatctaggagaaatctagctagcccccttcaacactggacgccgtgtgctgccttgggcctctacagaaagttcccaccagcaagaaggcgatccccagatacagttccttgactttgagttttcagcctccacaactgtaaataatacactccctttctctataaaccacccaatttcaggtattctgttacaagcaacagacagtggagtaacatatgctccaagtgtaacaaatgtaatttgaataaataagtcaacaagcagatttattgaaagaaaattcaggcaattgaaataattaggtatcttggatctagacataaagagttaatatatgtgttgcttatgttttaatgaccaccttcttacatttaactctgatttttcttgtttcatattgaaaatcattctaagtaaaaggcaagaaaaaagaaagcaaagcacagagccgataaaaaagtgtcccattgggatcacccatgcacgtggcctcaaaatctaggagccatgcttcaccttttgatcccgattctcccatatgcagcccatcagcaggcattccaatgtctcttcctttagaatacatcctatgtctcaccacctgtcaccaggccactatggctgccctctcctgttttctccaataattcccacctttttggcatttcttggacacagcaaactcattcctactccagggccttgaccccgcctggaccaatcttcctccttccccatcttcacaacctccaaggcatggctcagcagacagccctcaatataatcttttaaaagttttttaattgacacatggcggctgtgcatatcgatggggtgcacagtaatgtttccatacatataaggtgtagtgattcactcagggtgattagcacatccagcatctcaaacacttatcttatgggtgcatcatccctaagttcctttctctgacctcatcagtctccacccctttgcctagtgctgtttcctttcttactggtttgctttccttagctgctatgacacctgaaatcttgctatttgtttgcttgcctattttccactttgcacctccttgaaaagaagcttcatggccaaccaggcttgcaccacatattcccacatccttcctgggtcacagacaggcacctcgtgaatacttgttggatggaagagtaaatatatgggtaaatagggtgtatgcaatatgcattcccatgttgccaatctctgcttccactcgaaaataggagtatggcatcatgcaaatgtgtctctgcttttctctcatcagatgacaaaccactactcaacttgaagtgaacagtcagacccctttctcaaaactctccagcaatgcattagtcaggatcagcctaaatctaaatgtaattgccactctcaccatgctgtgagagctcatggcagaacaaggtagcagttaagagagtagacttgacctctttgtgattcagttttcttatctttaaaaaggaaacactaatgtagcctatggcatagggcgttcaaagattcagtgagataatgaacataattacttaaagtttctaaagcatgtaaatttctcaagaaatattaactaatatcttgtggcatattttctgtactacaggactgtcatatccaaactctatatcaatatgtgaatgttttgaaagccaacacacactttagagtttgtgagtcattggttttaagcctaagagtagatgcagggggtaaatgctttaggttgcagtaaactggaattaactaatctgcacactgacagctaaggagaaaagaacatattttaccaaatacataacttttattgtgactgtttgataagaccctttacgtccctaaccactgcttctatattggtaaagctctcttttcagaattgtcttctaataaatatgtatatatatatatatatattttttttttttttttttctgaagatacattatgttctttccggtgctcatttaataccaagccagtgtatagtttcttactctatgtaataaagacatgactgatgatgagaaatagtcattgtagtctgtcatatcacttgtatactaaagtccgtgacaagctgcgataatatgatgttctctgtaatgtgatcatgctgagtgtgacatgcagtacctgcatcagtctagacgtggctttagctactgaaagatgaggctgccactgtgtctttaatgtgatcatgctgagtgtggcatgtggtacctgtgtcagtccagacgtggttttagctactgaaagatgaggctgccactgtgggagctgaggactgatagggatctcacagtggcagaaacaggaactcgagaagtttcatagcaaatgtttaaaaaatagagattttgcagatgcatgttctgtattgtgaaaacaaatggtaaaattctttgaacaatgagaggaaaaaatctcctttacatggaggcactttgaattcatcccatcttctaagagaaagaggtgagattttctgcacaaacagagtactgtctgtggaaaagacaacattctgatttagaaaaaagggctgaggaaattacaaaaaagtgtatcgacacagaaagcttgaatactaatctaaatatgcatcatccacatggcatgaaaaaataaggtcagcttattctctttttttttgcatatttctaaattaaagaaaactaaatctccatgacattttgtaagcattacatgctaaaataaacagttcataacaatttgtgtatttttaaaagggattgttgttaggcagttataaagcttcctctgacctgtgataactgcctttctatctcagaaaacattgctaaagagactcaaaagtttttttgaattggattagccaagataaacataaggtggggggcattgtggttatgcaaatataaggtattttaaggaattaagaggactcaagtgtaacgcgtatgctacagagatcctttctgttgcaagagtattcacatcaacattgttcatatactccatttgggtctgaagttttagactacgaaattatctacgtaaagtatgcttttagtttatatgaattttattgacacaagaacagttctgctttttaatacagaagactaagaaccattttcattaattttaaaattgtataatttatattcttttaaattaagttataaaagatttacttgtttaatacaaaagtaaattcttccactttcttgataattaatggagatcggaaatctgttataatttttgataaaacacagagaagatttatatttcagaaatagttcaccacatatttagacctgtcacgtactgtctgtcaattactggtagttttgcagaagaatactgaagagttcaatatattcaagcaataaaatattattcttaaaaccaatcaaccaaccagctaaaaaataaattgtggacaaggagaaaaaaaaaaagaaaggaaagacctactctgaatatctttcatcagtttcaggctgtgctaaatgcaatgtaatatcacttcatggatttatgagaagatacctaggtaggctttcagtaatgtagccatagttcggagctgcaggcacaccgtcagcacacgcttggtgaaatggagacatgagagccaatttcaggaatttttataataatttgagaagtcattaactgccttttttagataaattgtttcatgaaacagacagagtgtgacagacccagctgattcatgatctcatcctatgtctattcagttcctcagtttcttccctactatgaaaaaaatttgaagaagatattcctaagacagctgcgtcaaatcaaccatactgtagaagcaggattgctgccgtggcacagacttggaatatccaacaattacagctctaccttttatcagaacataaaccataactgtgatgtccctcccagcattgctaatgacagtaaaatcttgaaaacaacttgactctttgttaacttgggatagggaaaccaattttagtaggtccatagttacaaatattctgaagacattaaaatatgtgaagtagacatataaattaataaatctagagagatgtttatgttttattaagtgaaaaataggcaaataatttcacagaatatttataatatttgtatcactcttgaaaaggactgaaaacacacatatgccaaacacgtacacatacatatccacaacagtcatatttaaatggtcatgtaaaggcagacttctacgtaatggggcaaaacagaatgtaatttgtacattaggtgatggaattatgggtgaaatttgctttctctaggactgattttatttttcaaaaaaaataagtaaacattatagttttgaaagatgggatgtggatgtgtgtgctcgtagcttatattatgcgttcttcatgactgtatttaatgcatgtctaagctcatgccttttatacaagtgaaacatacacaaaaagaaggtagacaagaagaagtttttaatggatatagccatttaaggcaaaaaagattgtgtttttctttataagaacagtgaaaagacaagctgatgagaaaacacatttggaagtggtagggaatatcttaaatgggtccagaccagttcaacatgaagtcagaagagtgagaaataactacagaagacctgctggctggcgagggctgtgaaccaatttgggattgaggaggaagacaatgaagccccctctgggggtctggggagagcctggagctgggggagcagagaacagggtcacagacaccccacattgaggggaagggagggtggaagggaagcaaggccacataaatgtggaattgagataattggtacccccagctcctgctctgttggaagccatgaagaagctacagcccctctaacaaggcacagcatggccaggccaaagaggatctgagcaggtgggagaaatagcccatgaatggcagcaccttagttttcttgagcttgttagagttttttttctcagcctggctttgttaatcagaatgttgagagcttcagaacttccacagagggtcaatacttcagagcgggggagggagtaaatctacaaagtaagcagaagagatttcaacagtgtgtcaagtgagctgggtctgggcaggccaagagtgctgtgtgaacagccagcaggcagggagccccctgcagtggtgagagtgtcactgaaactcaacagtaacctggcaagcagccacacagggcaagtgggtcaggggtgttaaagagaagcccagacacctgggctcttgtcagaagcaggaaacaccacataagctgaggaggaagggaagaagactgtgcgtgaggagtcctccgccagggaaggctaaggagccaggagagccctcggcaagtgcagccgtaggacccgtgacaggcaaaccctggcaggcgctattaaattatgagcaaaacctaggccagaaaacaagcagaatggggagaaatgtgtctgggaggtgtagggaaagatggacgggagcttttgtgagcagtgcttgtgaaatgtgacagggcatttagctaggagtcatgaagccaatgggatgatttaggcagtatttcaatactgaggctcacagaggttttcattctgttcttgggacacgttcagggtatttctggtgtggtcattgatgatgacagtctgaacgctgtaagaatttagccaaatcatcccacctgctcttcctgatgagggctggtggggtcaggtggccctggcaggtcagaaggtggaggtgaagtgggatgctgacaggtttaaattctatgcactgagccccatttgcaaaaattccacagctgggtgaacttaaacgcttgcttcactgaagcttttgtgtaagtttagctcattttctttaattctacagaacaaacttattttacatataaatttaaagtaaatatggaagtacatgtacacttgaatctgataacttaaatgtgagggtgcataaaaataaaatatgtgtctatcatatttgagttttctgttcatttcccattcatttcattctgtatctctaattttagatagttagatagatgtatggttaggcagacagttgtatggttatagacaaaatcttcggtgccaaaagtttttctatgaaatatacatagtggagcattttaataatactgtttagggttccagaagtcagtcaaatgtgatattaaaacagctcccagaaagcaaatatttgaatagctctggttctcccaatgttaaatgacagactattaaaactggtgatttcaatcccattcaaggacagaacaaatagaatatagaggaatttgacattaacttttcgctctagatgttcttaagtatgtattattccatattccactaactacataagactcctcacaaaacccagcagcacaaaacagaggaactattcagaatcatcaatttcctaagtggattttataaacatgtaacacttaattatgaagacttttgtttgttacagtagaatttaggagggatcctttccatgttttttggtacccattaaccaccctcacctccctacaacccccactacccttcccagcctctgataaacatccttctactatgtccatgagttcaattgattttattagctatctacccacaaagatttttaaaatttataataattaatatatatatatatatatatattcacacacacaaagaatttatgagggatcctgtgggttgagataatttgttcagtccttaagccaaaattatcaaacaaaatacaaacttctttttcacacgcacacacacacacacacacacacacacacacacaccctctctctctttcagaaatggaaaagttcaatatcactctatcattgcctttagggctggtacaaaaacattgtcgtgggggctgcctgtgccacctgttaacgaggataatggtaattgcgtctctctactgtaagcacctttaaatgaaaagtatgacttaacatttaacttctcctctctcaaagctttattagctttcaagcctagctgctcagcctctgatcatagaaagactgccaaaagaggcgaccttggtggatgcccctctcccttcactgccatagggcttaccccctctggacagatctcagcacacttcgtacttcacaggaaagccacaaaaacaatcatcaggtcacaaatgcagttttcaaacacacacataaagcctcacttagagaactgctaagtcaagcagaacccagcacccagtcctttgcagtatcctctttgtaatctgcactttggtggaaactgcagggtaatggcactgtcaaaaaacacagaatggcaagtgcaatggaacacaatacaggcggccaaatccattccaaatattacccacgactgagcttcactgccacaaatatattttgtgtgttacattcagaagacacttctatgaaaataatgttttgtttctctggatatgtattagtacaacatatttggccatttttaggacccaaataatatgtagatttgtgggattcgtggcttggagacagctgtacctatttttaacaaaagacctttaattatggcagaccatcgctgcctctctagtggggtaaaacattccaaacttggccattattactatcatttattcgtgaccatttatgggtcttcactatttgccaaacgctgtgcacaagactggaaattcaaagaggttttagacataggcttccttgaaaagataatttaaacaacatgtctcattatgcaccattaagaaacaaacaaacactctttaaaaagaggcacagtgtttccttttagaggtgagcaagtcctgaattggccccaacagcctctcactgcttgaggctttctttcctctgctttgaggccctatctcctgccttctgcggaaatgcttggagcatggagataatcattttacaattctctccacagtaaaacacatcacagcttcctctacctgtggatactttccccttagtcccctagtaggtgacacaggttttggtttgcctaggacagatagagtctttggttgtttctaggttgattattaatagcattatcaccctttactccaaaggtaacttaagggtaataatgccattggttcagcatttggatcagataataagttatacggtcaactccctaaataaatagtttgttggtttgcaaaaacattgtggaatgtgtgctactactccaatgatgaatggtgcctcagtggtaccctgtgtccactcctccaatgatgaatggtgcctcagaagtaacccgtgtccactcctctgatgatgaatagtgcctcaatagtaccccgtgtcgactcctccaatgatgaatggtgcctcaatggtaccccgtgtccactcctccaatgatgaatggtgcctcaatagcaccccgtgtccactcctccaatgatgaatagtgcctcagtagtaccccgtatcccctcctccaatgacaaatagtgcctcaatagtaccctgtgtccactcctccagtgatgaatggtgcctcaatggaactccgtgttcactcctccaatgatgaatgatgcctcagtagtaccccgtgtccactcctccaatgatgaatggtgcctcagtagtaccccgtgtccacttctccaatgatgaacggtgcctcaatggtaccccgtgtccactcctgcaatgatgaatagtgtctcaatagtaccccatgtccactcctccaatgatgaacggtgcctcaatggtaccccatgtcgactcctccaacgatgaacggtgtctcaatggtaccccgtgtccactcctgcaatgatgaatggtgtctcaatagtaccccgtgtccactcctccaatgatgaatagtgcctcaatagtaccccgtgtccactcctccaatgatgaacggtgtctcaatggtaccccgtgtccactcccgcaatgatgaatagtgcttcagtagtaccccgtgttcactcctccaatgatgaatagtgcctcaatagtaccccgcgtccactcctccaatgatgaatggtgcctcaatagcacctcgtgtccactcctccaatgatgaatggtgtctcagtagtaccccatgttcacctgccgccctgtagttgctcaaggtgtctgaaaaggaaagcgtcctggggcagcaccacgattcgaggtcccagagtagcccagtatgacggcagaattggaatgaaaagataaatgactagaagtgggactgccgtggtggtctggtgacctgtcatgaaagattggtgacatgtaaaggaccatggagaagtgttgaaggatattatgctgaagaataacatcctctgattttaactttgctatcaacgctgttgaaatacaggtgtgtgtaccctgtggcaggaacttccatgagctctcttttagcatatggtatgtgtttgggcaataagtatcaatatttcaaatgtgcaacaacattaccataattccaattcaaagaatttgtcctatggaaataactgcccttggtgtgaacatgaagatcgccatggaatgattgtttgtgatttcaaagactaggcatggtctgaacagaggtttaaaggagtaagctgatgggaagaaatactaagtagccaaaacaaataataaagttcatctgggaatatacgcaacatattgtaacgttgccaagcaacctgtaaatgtgtggaacatcatctaaaatttaaaggcaccgtgaagaagaagaacgaggaggagaaggaagaggaaaaatggaagatgataaaggaaaagaattgggtttttgtgtttataaacacagagatacaagtcttaaaaataagtacccacaattacaatcactgattatcttgagattaaagcatttcaaggtcttcactttctgcttcgtatttgactgtattatatcatgtttaaaataatgatcacatattgattgtattttatacatatatctacatttttgaaaagtacatttcaaatttattgtggaagataaattagaaaatggagagtgaggagagacaaacagctatgagggattaaaacaaaacatatggcaagactactaagaggcccctagagtggacacagtgagaatggaagaggggttgaagacaaaagatattcaagaggtgaaggaattattgctcagctggaggtgacagaggaggaaagccgtgcggaatgaaggtgggttttctggatttcctaacaagatgagtggccagcgtaagggatttagtgtggagggaatttggtgaatgagagacaattgatttttttctggatctgttcactagaaaagacacccagagattccaggacccattcgaacttgtagtgctgggttcagcaaagttgattatataacttatctctgtaaggcacaggaagagcccttgaaataatggaatgcaaagaaattcaaggtccaaagaagaaattatattaatagaaggataatattaacagtagtactgttaattacttagaagcatttccacatgcatcatttctctgagaaacacagaaatgataccattagtgaaggtacctatcattatcatcaccacagttatatggcatatgaggacattgagagtcaagaatttcagtgtcttttctaagatgaaatagctgcaaaatgggcaaagtcaagatgggatcccaggtctgtgaactccagactgattcttctcatgctgtattagtgccctagaagaaacctagaccttgaaagcatgtatttgagaaaaggcagctcctctgagttataaatgactcttaaaatgaatgggagaggaagaaggaatggaaaggctagagaaaagggggaatgagatggcgggatgatataaaaacctagatatttctattgtcttttactgtcttcatggaaaccatgaatttctctcagggtactttttgacataaattagtggaacctaattatcactagcagcctttcaggagaacttttttggctatatatctccttgatttgaccctatcgagctagagaaagcaatttcatttatccttctgtaacacaatggcttagggtaaagggtcttttgtagaatttcatcaccatttactgattgattcttccagttcctatttacttccatgttacagacgcctcacgttgtatttagaatccagattcacagagcatcccaatgggcagtgaaaattacagtgaccactcattatttaacagcaataaaacggcaggcagtgaatacacacatgaaaaaatgcccagcatcactaatcatcaaagaaatacacattagaaccacagtgagatgccacctcacaccagtcagcatggctattattaaaatgtcaaacaataacaaatgttggcaaggatgtgcagaaagcaaatactattggtagcaatgtaaatgagtaagcctctatggaaaacagtatggaagtttctcaaagaactaaaactggaactcccacttcactcagcaattctactactaggtatctactcaaaggaaaggaaatcattctacgaaaaagacacccgcactcctctgttcattatacactattcacaatagcaaagtcatagaatcaacttaagtgtccaacaatggttgatcagataaagaaaatgcggtatctttacaccatggataccacacaatcataaaatgatacatttcttggcaatatggatggaacagaatgtcattatcctaagtaaaataatgcagaaatggaaagtcaaataccacatgttctcgattataaatgggaaccaaacaatgggtacacatggagataaggatggcaacaacagacactggtcactccgaaagtgaggagagaggcaggagagtaaagcttaagaattgcacattgggtaccatgctgatattcaggtgatgggtgtactaccagccccgaccccaccacgatgtagtgtatccatgtgacaaaactggacatatacccgctttaaaaaatttaacaagtaaaattaaaaacagaaaaagaaaaaaaagtagtatctataaagttagtcactgaggaaggagaaatgtatggccctccaggaaggcaggggctagcattcacagacagaggaagccatgcccagaggcttctgcataagcgagggatgcagatgatctcccgtgagctgcgtgtgcctgtgtgcactgcagggcttgccttatctgctacgtcagaaactttgtgaaggaggagtcctgactttacacatcactaccacccatctcataaaacactctgcaggtttagagtaaaaattcggtaccttcttacagatgaacataaccatatgagggaaaagaaaatccaacccacaaaaaaaaaaaaaatccactgtaaataatacagtagtaggtggggaaagatggaaagtgaatgttaaaataatgatgtagaatagagatttgtatcatacttgttaaaggaactctagtggcatggaggccacaaaacatcaactgatgagagagttttagaatctagaaagacttgggaaccctcctttcctctatctgcatcttggtcagtattgctaatgggacacacacacacatgcacacacacacacgtacacacatgcatacacacacatgcacaaacacacatgcacacacacgtgcacatacacatactcacagcatatatatgcacacacacacattaaggttgaacacagatgagtgccacagcaatccaaaatttattttagcctgcttggcaaaatcaaaagttccccacttaaaactctcccttaatatgcttatttttttaactcagtaaaattttatttctagaaatttttctgaaggcaaatatcctggatctgtgaaacaatttatccactgggaatttaaagacactattatagttaataatgaaaaaaaatcacaaagagttacatgttaaacaactgattggttaaaaataataataatacggagcctattggagggtggagggtgggagggggaagaggatcgagaaaaacaactaaggcgcactaggcttatttaccgggtgatgaaataatctgtacaacaaacccccatgacacaagtttaccttttaacaaacctgcacatgtacccatgaacttaaaagttaaaaaaaaaaccaaaccatccatttagtaattatttttaattgcattctattagcccaaaactcttcacaagataatatgaagtcaaagagaaagtagaagcatttagaatgcaatgccattctttgcttggtcatgatctgggtgggaggaattatacagggttgtaatttttcttcattttataaatattttcaagaatttatttcttccccctatttcattgtcctaatgtatttggcactgtgtgactacgttttatttagttgggttttttgtttgttttctaatgtcttccttctaaagtgacatctccgcacaaaccgggattttagtgacttttctcacactccttcccagttatctaaaagtgtgtaatttaaacaattgctgaatataaaaggttttgctttgttgttactcatatcattactattgtatttaagtacgacaaatactaaaaatgagaaaaattgtaaaaaaaagttcaaatgcataaaataggtaacgtattaaaaggtaaaaaaaaaaaaaaaaaaaaaaggaccacatctaagacctgtaaaactaactgagctccaaagaaaataggtatttacacctccctgtatcttaaaccatataaatacacacctcttactcacaaaaaaacaaaacaaaaacacaagtaaaaacattttttaacctggcctggcacagtggctcatacttgtaatcccagcactttgggaggctgaggcgggtggatcatgaggtcaggagttcgagaccagcctggccaatgtagtgaaaccctgtttttagtaaaaatacaaagattagctaggtgtggtggtaggcatctgtaatcacagctactcgggaggctgaagggggagaatttcttgatctcaggaggcggaggttgcagtgagccaagagtatgccatcgcactccagcctaggtgacagaactagactccgtctcaaaaaaacaaaaacagacaaacacaccaacatatttttaaacctatttttcatgaatactaatgttcattcttttgggtacattctgagtatacgatcattaaagttctgtctttttaagctacttttattttgatttgtagttgtatatattttgggggtacacgtgatattttggtacatgtatatgatgcataatgaccaaacagtgtaacaggaatactcatcacttcaaacatgtatctttccttgtgtttggaagattgaaattattttcttctagctattttgaaatatataataaattatcattaactataattttcctactctactattgaatactagaattttttccttttccctaacttaagcaacttttattaagaaaaaaaagaaacggagtaaatcctgtaaacttttctcccaggatgttttttgaatgttttgtcgtcctcagtgtccataaataactcctacacaaacctagacattcattcactcacacctgctaaatagttgcaagtctattgtctacagctgtgctgttattctttacctctgtaacactttacgttgtacactgataagggattagtcttcttagaaatgctggctccacagtatatttgtgtgtgtgtgtgtgtgtgtgtgtgtgtgtgtataatacatgtttgcaagcaaatcaaaagcatggcccttgttctccattttatttctcagctccaagaggaggcagtaaaaataaatctatttagttctgaaagttaagaactgaggtgttataagaaaatcaatccagcagaaagtggagaatgtacgtgcccttgtggcagaaaaaccaaccaaccaaacacacaaaaaacccaaaaaaccacaatcgatcttgaaaggggtgatgacagaggtgtgagagggaagtagtcaccaaaaccaaactcagtttatgaaaaaagttgcaactgttaagcagcagtaacgggtaagtcatagacaatgaaatagctggcacacagagacaaatatgttggagagttgacaaggacacaatcatggatcaacgccataagattaatgatgaatagctaaggaatgctgggcttaatacctaggtgatgggaagcaaagcaccatggcacacatttacctgtgtaacaaacctgcacatcctgcacatggacccctgaacttaaaataaatattgaaaaaaaatactcttacttaactctgtagtgcaagacagcaaaaaaaaaaaaaaaaaaaaaaaaaaaaagagagagatcaagaaagaaagaaagatacatagatagacagatagatagatagagagatagacagatagatagattaatgatgacagccaagatgaactaagggatctgtcaaagcaagttggccaggcgtcctcctttccccagtggcatgggagaaaagtgaacagggcagttggtggagccactgtgtctttgcacggggaaaggtctgattgaataatggggaggctcccttcggtgttataggaaagggtggtgtgtctaatctctacttctccaccaatccgtgaatcgcctccttaataaagtctactgaaccatatctattccaatcacatttcaaaatgtcttaaaccaatatatacaacataggtttctatgttaaccttttaatacttcaaatgcaagtgaatgcctcttcttcatctctctgaatttgttaattcaagttctttaaaaaaaccattgaatcataaaagaagttaaagctccttccctaaaacagatctgataaacatatcaggattttcttgcaagcattaagtttaaagcaaatttttcttatttactagcagttgttcattaagaaacgtgtagtgtaaaaacacaaattgctgtgactaattacataaccctgagatatctctcaaatatattgttttttttttctccccaaatgacatgcaagcatcttgatttaggttcatatcatctttcatagttagaataaggctctagattttcctgcttccagttttgtgccatccgtgatgcggaccaatcttcccaacgtatacgcattctcatgccattcctttcatcaatataatacattgacaccccatttcctttgagaataaaacataaactctttgcctgtcatacgggaccctgtttatatctttctgaccctagtcatttaaaataaacagaaagggaaggaggcggagaagaaggagagggaaaagatggaggagagaaagaggagaggaggcaaacaacaaagagaggagaaaggaaaggggagaaaagacaaggaaaaggaggaggagagggaagaggaaggggatgagaaaaaggaggatgaggaggaagagttgaagaaaagaataacaagaaggtggaggacttagtatttggcaaataatattctaggtgctttaaatcgattacatattcctcacaacaaaatttaaaggtggatagagttaatacaaaaggaaatacgaacggacccaggacatacagccatcccttcactctaggcaccactgtacctagggaccaccgtaccgctcctcctgcacctccaccagcccctcctggtgtgctgtcagtgtgctcagccccggtacacccaacccacctcacctccctttgtccatagaggatgtgaaggtttattgaaaaagaacttagattttcaagaaaaaaaaaccattaaaaagtgggcaaagatatgaacagacacttttcaaaagaatatatacattcagctaagaagcatattaaaaaaaggtcaacatcactgatcattagagacatggaaatcaaaaccacaataagataccatctcacaccagttggaatggctattattaaaaagtcagaatttaacagatgctggtgaggttgtggagaaaaaggaacacttatacactgttggtgagagtgtaaactaggttaacctttgtggaaggcagcgtggtgattcctgacatctaaagacagaaatccatttgcctcagcaatcccattactgggtacatacccaaaagaatataaattgttctatcataaagacacatgcaggtataagttcattgcagcactattgacaatagaaaatacatggagtcaacctaaatgcccatcgatggtagactggataaagaaaattggtacatgtataccatggaatactatgcagccatataaaaagaatgagattttgtcctttgcaggggcatggatgaagccagtatccttagcaaactagcgcagcagcagaaaaccaaatactgcatgttctcacttctaggtgggcaccaaatggtgaaagtacatggacacaaagagggaaacaatggtcactaggaactactggagggtgcagggtgggaggaggcagaggatcagaaaaaacaactgttgggtactgggcttaatacctgggtgatgaatctgtacaacaaaccaccatggcacaagtttacctatataacaaacctgcatgtgtatcccttaacctaaaataaaagttttaaaaataaaataaaaataaaaatataaatgaagacataaaaagtaaataaaaaacaacaaaaggaagaaaggaaggaagggaggggagggggaaggggatgggggaggggaaagagaaagggaaggaaagggaagggaaggaaagggaagggaaaggaaggaaagggagaaagaaaaagcctataatacctatcatctggtatcagctcaaattcccagccttgtttaccgacaatattcccaagcaatgcaactgtacagaaagactggttatttcccctctctgaatttctggaacgtccaaccttcctccacatcctctgagacctctctgcccccttccctcacaccctctgctacttgcctttcttgaacatcctctgcagatccgtcactatttgctgtattaaatgattctgctttctcattatatagttggactccttatcctcatcactctccttcttccttccacacatcatcacacacatgtgttgacatccccatggacgccggagatggaaacccaccaatgactgtgcaggcatccagcatttgtgggaattcatctgatgccttagaaaagttggtactgacagaagccactattagaattacatgtgcttcagagtattgatttacttaatatgtttaaaaataattttataatttccattataaatatataataaaacaaacttataattaaatacttgaaaattcatatgaaagtctttttgagggttataaagtactgatgttcacttgccaaacaaaacaattgttgtggatgtttgagtatttatttccctaatcaaagtttcacatattttgttttactcatcagaacacctgtcagatccatgtgtgctgttgtcaatggcagaatttccttctttttatagctgagtaatatttcattgtgcttgtataatacaccttgagtctgtacagtttttgtcaattatacatcaataaagctggaaacaaagaaaaagaaaactaaacaaagaacaaatcagtaagatgtactaacgttttgagttttttaaatcctcagagtttttaatgagctttaatagcaacaaaagtattgcacaagaagctcaaattagaatcagtagctgaaattatgtcaccacagaatgtatttaaaatgtgtgtgtatatcaatgtatttatctttatatgtatttgagagctatataacagaaacttttaacttagaacacacacctctcattccagctgatatactgtatatgtgtatatataggtgtgtgtgtttatctatgcatatatatatacacatatatatatgtatgcatgcatacatttatacctaaaagatgttagtagaagacaggtcttccatgatatatttaatctttccaatgaagaccctggggataaactttataaaattattcagtagaaggtaggtccttcatgatacatttaaactttccaatgaagaccccagggataaacttttgagagaattttatcttaattactataacacatgtctcacaatatatattactttttcaagaattctgattgcaggactcatcaagagttctgaaaatagctggattgtcaaatgtgtctacaataaaacatatttatacatatcatataatattactttgcattgactttctaccagaataccctggtatgagctgttccaattgtttaaaaatctgcctctccactaaaggaatcttcttgagaggcctttcattttataacttcctgaatagaaaatgctagtttcttctaaaagttttagattttctaacgatagatatttcgtgttccttttgacatgatatagcatgataacatgtgatgtgcattattagggagatgctaagattccgcaagtaattattttgcatgaggagttttacataaatacttgcaataaactgaccatggcagcacttggttatacaacagtcaaagccgagataagactaggaaagagtatgaatcaagagaggattaaatgtttcaaaaaaagagaagtttgtattgactaagagagaattggcgtcggaaactgcttttctgtcctatcttatttcttaaagtttgcagaccaggtcaaacacacaaattgaagtatgcaaattcttcacatccaaaatgcttcactgatgcttctggcaagagtcattgcatggaaactttatgtaactgtttctcttttctcttatgttcaatacgtaatacactttcatcaacgtgcacttaattgagaaacccacttacttggaatgtctcccaaggaatcaaattaagcctaattatacttaatggcaatggctgctgcttaatttggatggtaattctgcttaattgagatgccttcaggtgtctaagtggtgctttgctaagagtattggttgtgcgggtatgtcaacctggaataccttgtttcttctctgaacatttctccgagataaatgacaaagggcaaataattttctgaagcaatataacacaaaataactgaaatttaatgtgttaattattaagtcctcacaatcaagaaaatatatacaatgtctgcataagtgtacacaaagatgagagagaaaaaataaacttctaaaaggagagaagagaattgtataaacccaagctgcctaaattcattactggtcattttatgttttggacaagtttaaaagtccactttaagaaatcaaagaacatacatcatgagttttaatggatgttagccataaaactaaagtaaaaggaagatactgtgattggaatcacatcatatgcaaaagatatactagtgttaattccaacctctttccttggtgtctggcttgcctggatgtgatggatatcactggtcaccatacactaaccgtcggctcctcttcctggcttctagatatttctttccttggctccgtggcaattggaccacaggcatttgacgcaatgggatatgaaggaactcagcagacaaattctaggaaatatgtcttccatctctagccaaacatgcctcatttcattaaacatgaccaaatcgggaactaaagcctcaggtggttgcagacgtcttgagaactgaggggaaatattgtctccgctctagagagggggcaggaaaaatgtcaaacacctgagctgcaatgctatcacggagctactgaatacaacctggaagctccctgactctgcccctttgttatctaaaataaggtatcccccaaactttcggtttttagttggctcttctgttagttacagccaaaaataccctatggaggtagaaaataacctgttctttcatttatttatggtggaaagcaagcaagctaataaagcgttctcacagtgcaatgggacgacaaggagtttcactttccgggatcttgacttcctctctgtcaagtagtaaaaggtttaaacaataggaactctaagcttctttttagatagaatttcaattattctagtatgtgtaggaaaataatagaaactaaaatgtgctataggcacatctttcatatagaataaaaatatttatgattattgatgtataatctggatttaaatgaatttggaaagtggaaactgtgggtattccactccagggcaaaacacttcagtcttttaaaactctgtaatggcacttacaggtggaagatcattctcacgacagctgaggcaaaatttacctccaactgactatgagagaaaaccaacgccatcaacaaggctttcttggactatattctgctttctgcatgctgtcatcctaatttctggtttcctcggctaacaacacacctgtgaattctaaatgtgcctctgcccattccatggacttggatggacagtaggcaccttgctatctctgtgcctaatagcatacacatctcctacataaagaaattggttcctgaagtctgttccctggttaaaggtacggagaacatatattgttctgaactggaaagattttgagaatgcagtagaggcattgttagtaactgttcaaggacagcagagatttaccaagactcctctgcgacagaagcaagaatgctcacctgcctcgagtttgactctcacccacggcgtcatctctctctctcctgtttcccacacccacggcacctactggaggcagctgcagggggaagcctgcaggggtgtgaggtccaagggaatccggtgttctgcgctccccgagctcgggggtcctgtgttcctccctccccatgcttgagggtcttgtgttcctccgtccctgtgctggaaggtctccagtcttgctaagtctccgtctggggcaatttcccctgcaccactccatggtgtctgctctgtttcagaccttatcatctttcatctgaagtactgtattagattccaaactctgcgtctcacgtctccttctggaaaccttttagggtgtacttccgtcctctccaccgaaagggctacaggaagaagtgaagttactgcgtgttcaagttcgtctcctcgtggatccccctaaagcgcagccttcctaaacggtagcccattcatttgacttcaaaagacgcgaaagaaggggatggaaagaaattccacctgtgagtggtatactgagtcggtgtccctgcaggcatttggctccatcctgctagggatggctgcagagctgtgagaattcacctcagagttttctgcccgacccattacaggggcgcattcgagcactccttctccacccaggaagggcggtgggagccccctctcagtccaagtggggctgtgtcaaaaggaggagaagactcctgcaggctttgcaaactctgagggcagagcctggggcagaaagcaggagcttcagggagcagttgagggagggctgaggctctgccactgtgaagcgggctaagagcagggaggtgggcaggagaggggcttggagcaacctcatcacaggcagcagacgcagggagcttcctggagagcccctgattgctgtgtttctcctgcccagcgtttctaattttatgtaatctccactttcacacacttttaaaatttgtgatagattcatgcaattctcataaaactacctggaacatacacaggttaactaaaccattcccttgatttgatctaattaattccttttagctatgttttctttaaaagaaattcaagaagagttccttctgcctctcaaattgcagaagtaacataattctgtattttgaaaatgtcgcaatgggatacttctggtctcgatcacatctcaatccctttaatataaaatatttgcttttatttgagcccctatggaaatgcatgtaatctatttactcttaactcaagtcaacacctaatatagcccccaaacaaactcaattgttcagctatttcctctgtaaagttctactatctaaccttcagaacttttctaaattctcaatatcatatgattttctggagaccaaacagaatattctaattatttaaaagtgtgtaaatgcagaaattagtaaacataattatcaataaactagttatatactatataattttaattcaaattgaaataaaactcttttttgttagacaaattaatgagatggcttagtaaatagttaacaaattgttaataagtgtttttttctatttatcttatgcttgtttctgttacactaccagtattagcagcttataatagataatgatattacatttacttacgcaacatgtggatttatctgtttttcacaactattctctaaggtaaatgctattactatatctctttgcccaaattcatgcaactactaagtggcagagctggttcttaaagtgatgattgcaagtactgaaaaataatagtttcttggtaaaaaactgagtaacaaaccattgagtagcatatagaaaaaacaaggtttgtaccactgtagttgatgtcccagggtacaacacggctctagcatactgagaaataccagaatcaaacttggaggcttttgtcacagcaaagagagcccagaaattcctcagtgtttcagaaagcctgcaacgccctggagttttacccagctctgctcattaaagcttgaatttttacataaataataactgagattttagaactaaaataagccaaccaaaaccaaaggcatctgtgatgaacactttacggaatctaaaatcagaacatttctcttttagaactggcaacccaacagctttgagaggaaactatataaataagatggatattttgacaaaatgtaaaaatgaagagatgatcacttagacacagaactgttagtaataactcaataattggtaaatagtggggttcagtaaatttaatattactataaatataattattttaatattacataatttagtgaaatccatacctataatagtttcctcacagttttttttaagtgaaatcaatatgaagatgtctaccttattttttcttcctactggcaagcatctatattgaacttaaaaggagttaaaaaaattcatttgatagccaatgaaacatgattatgagtatgatttctatcctaagatttaaaatgtagtaacataattgcaaactatgtatgcaaacttacagagaaataacagtattaccctctattactaccctggaggaaatatatattttacacaaagtatttaagaaagaggaaaacacgctcagatgtttaattcttgaaaaacgtatatagcttatgagaagaaacacatgaactgtagaaaacaattcaaaagacagaattgttttttatcttttcttgatatggagtcttgctctgtcgcccaggctggagtgcagtggcacgatcttggcccacttcaagctctgcctcctgggttcaagcgattcctgggcctcagcctctcgaatagctgggatgacaggtgcctgccaccaagcccagctaatttttgttcgtattttttagtagagatggggtttcaccatgttggccagactggttttagaactcctgacctcaagtgatccacccactttggcctcccaaagtgctggcattacaggcttgagcgactgagcccggccaaaagacagtatttttgtgtctgagtatagtaggagcatttctaacacttagtcatactatgcataaatactgtggtatttaagaaagcttgtaatatagtggatgagacctgagttgaaaaagacataagagaaagcactatgatacataaaggaggaatgtagactttctctccagaagcactaaatggcaccacagtgagaatactcactttgcatctgaatctcagactgctctgcaatgaatgtggcatctagacacaggatgcagctggaacttttaaattcaaacagtaaagtgtaagcacggatagcatttgctgggctgtttgcttcaacaatagatcctataagagtgctgtgtgcattaaccacaggggttggaggcggagccttaccttgtccgggtcggtggtggtgatgacccacacacagtgtgcattatcttcatactgaaccggataattaggggaggtaatgacgccgctgggcccacgcagattggatccacatgttctcgctggaaacacatagaaacgacgttattttctacaacattgtgtcagtttggtaaagacataacatttatgggaaatttcaagttagctattatctaatcacagtaaaaaaaaaaaaaaaaatggtgcatggactccaactggggcatggactccagtcagcaagtggattgctcagccggcaggacttttgcttggtatctgcagtgttacgctgggacacttcatttttcccaaaggcctatccactcaccaaaggatctaacagatgacagcctcatgtgcaatgtcaataccaaagtagcccatttcaaatcccagtgtgactcagagtgttcacgtaggtgtcgttgttcagagagtctccatacacacctaattgtgtgcgactgcagtaagatagagggaaaggcaccgccgagtgcaattcaaccagagttaccatctcagctacgtcttacactgtctgacctccaataaattgtgtcttttcaactttaaaaaagggttttggagcagatgatctccaaagtcactttcgagctttagattctattctacaataaactataccaatttctttacagcacaacgcaaataggaacttaaaatttattgcaagtttaaagaaagaaaataggaatggtgactttaaaaataaaaaaaatcttaaagttgaaatgaaagactgagtgaagcatagaaattgcataattctatatatacaacttagtctggaatacaaaaataatttaattggcctccagtttatgaaaggagtttttttttttttaaatcaatacacatattttagaaatataatgtcagcagagactctggttttaacattcataatttaaactgggtttcagaaaggagcagaagaaactaatttcacaagaagaaattaatgtaagagaacttctgcttcattttcctaagacatcctatgacacaaactgacaaaaatttttcataggaaggattaatcctcgtcatagcccatcctctattttttcattccttgagtttaaccctttcttcaagtcagttattattctagcagactcagctacaaaactcagcacaacaggacttgtgacttaacaagggctactttgtggggggacaagaattaaccactgaacgcaggttttccaaagggactcaagaaccagacatttctctcttccatgcatgtcaaaataataataataataataataataataataatacaaatcatggctattcctcataatgcttctttaatctgtaatctactgtgactgttcatctgagatctctcctaaatggttatgcattccctgaccttaggaactgtcctctttctgcatttacctgtccctcctcagcactgtgtaccacgctgcagtcctagacatgtgaaaatgggacaacataatttgagacaactgttcagttgcttcctacttactatggaaataattagctaaaattgacctattctacattgataagtgtgttaaaattaacttttaaaatgctggcatttactgtccaaatgaaaaacaaacatgggtaaaacataactgggtttccgaaactcagtaggtgtgtcattggtctaaaggtcactggacaaaggactggatgaaaacatggacccctcttatacactaatatctcactctctaatgagtctgttttaatgagctgttctcagagaggatcataaactttagatgtgaaatcttaaagccctctaatattagcattatccaactagaaaacctttgaaaaaagtgataataaactctgagttgtaatacctttatgttgcattttcctactttttaacacttcataattaacagctgttataaacatcatgtagcgttcataaatatttgctgatttaattgtgaagcaatgtaaccatattggcattgtcggcctgcatttcaagcttttaaaaagtacatctgaaaaacatctgcaggggaaagtcatttgttacaatcctactgacaaggtgggctcagcctgtcattggcccagatgttcccagccggaaagatccctaaagctggccccgcccatggctttgtgtcctaggtgcctgctgtgaagctggcccctcacttggcttatgaaaattggctaccagcatctcatgaaatgcatctcatgcatcatattttatttgtgaagtaacttttaataaaatatgcataggaagccagcccgtcaccacattttcaggcctatgaagtaccaagtttcacacaaagcaagtcatggacccagttccttcagagacattctttaccaaaagctttcaaattaacccatgtttctttttttaatttagaaatctctgtccgtctttgcaacatattttaataaaaaattgtttattttttgtccatttttttattaagccatcaaaatggtcatctaaaatgaatattgggaatattcagaccagagatttgtgtctgatttgttcatttgtttaactttgccaattagaacaatttttagcatttgattgtttcctcaataaatattagcatagcttctgaataggtgtaacagccttaagtcacataacctaactgtaattatgtaattctaaccctccttcttaggacattgttgaaagcttgtgctactttctcaatgtttgcctttctaaatcttctccaacctaatcatctgcttctttaccatctgatgatgcgccccctatttggctcgttatgatttatttagttattgcctccttgcatctagggttttctactagtcagaatcaccctcagtttttcaaatggcaactaccgtaagttcagccgtgcatgtgtagagaccttattaaacaaccaccctgtggcttgagctgttgtgatttctaccagccgatgtccacacggtggtgaacagagtgtctgttgtcccctagctgtcctgcagctcaccttattacctgggccaggaaagcttacattaatttctctgaatttcatagtggagagagaagagccaacatacagtcctccatctagcacacccactgtcttccctccgtcagcttccagcaccagaagggtataatttctcatgtctaccatatgttacgctttaaaaaattaggtatttggaaaatagaaaaagaagagttagagaagaaaatgggacaggctgagaaagaagagatgacccagggctgagctttgtactgagtagatccaatgagtgagtgtccttgctcagggagctttggtgatgatctgttagggatgcctgctgtcctcccttagaaatcctctagttagacgggaagggcacagcagcctgcgaggcaggaagaataatgggtgtcgagaaaatctcggcagtgcacgcaggcccttgcaaaggaagcggatggctgccattatcttatctaaaaaccatatccgtgttgctttgtcgcctattggggggctgtattgaatacaaatttatctgatgttctgggaggtcacgaaacgatgccataagttctgactcagaaacatagacgtatgaaagtttatcacctgcctctctcttcactcatggactctgctggtttttcacttcatgcaaagaaccgattgggcagctcctcacacaggagacagccgagggaaactgttctgactgggactggacaatttcatagcatccctggaggcagggaaacttctttccttcccttagcttctgtgctaaacaggcattcaattagtcaacgaagtatgtgattaaccagcataattaagtaactacagtataccagtgccaagccagtttttaaaacaagatctctctccgtaagttgccatcgtggatatctgtagacgcacgtttacacaaactatagtagaatgcctctttctactcttgcaaaggccttgcctcttggaaatataacatctaatagagagtaaaattcaccgacatgcttgataaaggtacttggataataactacgacctaatgtacacctgatgttacttgcttggcagttttccagacctgtaaactcaaatttcacttacatcttttctgtctccccagtaaaactagaattcacagaatgataaattgaaaatataaaacgtcaggagggaaagtggaaagggagaagaaaaatgaccaattttggatgccaatgcatgccattttgacatttatccacttaatcaatgaatatttgttaagtataaaataggtttgtttcatgcaatttatcttacttaataaaagtaataacttatctgtttatttaaatgcaattccaggaaatcttatggttctatagtaactactcaattaatcaaattacttgaaagaagaaacattctaattgattaaatttaaattagtgggatttcaggagtcgcattagaagctttttttaaagcaaatttataattacattggatagcctatttctcatatgtttttaggagaaatcatttttatcaagcacaaattttacgtccagattgtgaaccataatgaagataatatatcacagaggctaagaacttcctttccttcaccacacctggttccaggcctggcttaggtagtcagtagctgtctcatcttaacttatttaattttaagccactcagcttatttaattagaataatcataactccacttatgattgctctaaggattgaataaaagaagacaataaagcatttactacatggcctgacatatcacagcaaggccagtgtggtggctcacgcctttaatttcagcattttggaaggctgaggcgggtggattacctgaggtcaggagtttgagaccagcatggccaacatggtgaaaccctgtctctacgaaacatacaaaaattagctgggtgtggtggcaggtgactgtaatcccagctactcaggaggctgaggcagaagaatcccttgagctagggaggtggaagttgcagcgagccaagatagcaccactgtactacagcctgtgtgacagagggagactctgtctcaaaaagaaaagaaaataaaaagaaagaaaaaaagtatacatgcagtgctcatcatgagttgaacactgagggtatggcggagagagaacaaaactaagtttcttgccttcagcaggaaactaacaaacacatggacatataatgtcagaaggagaaaactgctttgaagaaaggcagataaaagatttgtaaagtgagggaaaaggcctgctctgtaagaagtggttttggaaggacgtgggttcagatggcatttgacgaacggcataaatggacagtcacagggatacctggggggaggcggatactccagagaggggaaaccaaatgcaagaatcctaggagagaaacacccctggcaagctctaggaatgtaaatagcaccaacttaaggttagctttcaggttctttgatgtcaatagagtatgagagtagtataagatacaaaactatattattgccaataacttagtaaaaataataaggagaaaaatatattttctcccaggtgaccttcaggtaaaaagtataaagcttcaggagtcaggaaacagcagcagaaatttctccaaattcacaggaattaaaaattaaccgtgtgttcttctgtctaaatctctgagacagtggttacctgatcaaatacacaaaatattatcctgacactggatctataacctggtataaagaagagtcatctttcggggtaaatgatcttcttattactctttaaaaggtcatttctacaagggcagaaaacaccaatggaaaagaaaaagctgtaaaagtttttggtaaatgatgagttcacaaattaagaataatttttagctaacctcatctgaaattccaacgcaataataactttattccctgactctgcctggctccaattagctcacaggtaaccacagttacaactggcaataatactttatttctcttagagggcttttcatctcagggagcaactcaaaatattaactctacagatcaaagtgcattagcattaaagaagttctctacataaatcgcccctaaagactgatggaatgaagtaccagcctgaacattttacttaaaaaaatagaacgatatactcttctctccactttgtttgcttattttaaaaatctactgccagttaaagatactcatacagttttaaacagctcgtaatgtcttaccctgcaaaaaatcataatggttgttttcatattcctaaatgaagtaagcgtaattccaaacaaaatcacttgtataattactgagctatgacaaccattcatctgtttggtaacaggaagaaaaggtaatgttgccccccgttctcagagctaattagctaatgtaagcattggctaaccacaccagcctccagatggaaggatcacttctgactcactgcaatttatcgaatgcttccatcagatattcctgctccagagaaggcatgatcattacttcagagttacagtcccttcatgaaaataggaaccttgagaatcagtccttcctggatgcacctcgctggaatacctttatgctcagaatggacctgatgttcagaccaggggcattttattgcatttcatagacggttgagttgagaatatgtggcagaaacgatcattatcaggccacctttagaggctaagaatgaatcaggaaaattcaaaactatgatgctgtcttttttttttcctttttagtttttgagatgaagttttgctcttgtcacccaggctggagtatagtggcacgatctctgcttactgcaaccgccaccttcgagattcaagtgattctcctgcctcagcctcccgagtagctgggattataggcatgcaccagcatgtctagctaactctgcagagacagagtttcactatgttggccaggttggtcttgaactcctgacctcaggtgatctgcctgccttggcctcccaaagggctgggattacaggcgtgagccaccgcgctggccaatgctgtcttttctgatactattttttgtggtaatggaagagtgacaaatgaacttggaaaatggtccctgctgtaccgaacgtgtcaacagcaaagaacgattccctgtagtctgttttaggtaggatttatccattttcctggacactgtagatatataacgttatctttttataaaaagttataaaagctccacttttataaatgtttttcacctcttctctaatggatgaatccattatcggaagcaaattgagacgctacttaaaaaagggaatggtgacatactcagggttcctaaaagttgccaacctgaggaacttacgtattttaattgaagaaagagtgttctacagagggatgccagccaggaagtggggcacaactcactgggctcatttctcctcttcacaactacaagggtgttgatggtttttcatagtgaggaagaaaatcataactgtaaatgtctaaacttgcgctgtcatatgtggcaactgctagccacacgtggctactgagcacctgaaatgcagctggtctgagatgagctatgctctaagtagaaaatgcacactggatttccaaaacaaagtatgaaaaaaagaaaatatataaaatatctcattatcatatttgtattaactatatgttagcatgatactatttgggagtatttgggttaaataaaatgttattacaattaaattcacctgtttctctttccctttttagtctagctactaaatatttcaaaatcacatacatagtttgggaaataaacacatacctttcccagttactcaatccagcactaacttaggtgctcctgtgaagggattttggaggcataattaaactaccttattaactgactaagttaaggagattattttgtctggcctttacataatcagttgggaagtcttcaaagagggcttagaatttcccttacagagcaactcctgcctgtggacagcagctttgacctcttcctggggagcctggcctcatccctatctttccttcctaacagcctgtctttcagaattcagatatagtgccagccctaccaatcatgtgagccagttccctgatctaagcccacacatttctctccatcctagtggatttgcttctctgcttgaatttttactcacagagtcaactgcttggacatgaggtgttgctgaagcaaatgtgggcacagctttggaaccgggttgtgggtcagagctgcatggttttggggagtgtcatagagaaggcctcaggtgcctcgaatagactgctagtagaaatctatcttgtaaggatactcttgatgggacttggaaagagctagagatattcctggaaaccgaaagaggtggcagaagcttagcagaagtggttctgtgattaggtaggaagcagggtgttcagcgacaaacacagatggacagctaaggagagttgcaggccatgtgtccaagaggccacttgatttcttcttgctgctgatactaaaacatgataggaaagacataaactgaggggaggactatcaaacaaacaggaatcagggctgggtgattttgaaacttctcagcctctgcagatggcaaaagaggctgccatttggaagctacagctgcacaagcattctagacaggaaaggcagagcgtgtggctgcgcagccatgccctgaaacctcagagtgactgtaaggtcagaacacaagtattaggtcccagaaaggatacttttcaagaaattgagggtttcttatccatcttatcaactgatgcaactagatagataaggagcattgtccctctgaagtgtcagcaggagtccaagatggagaaacgattatctcaaaaatatgtgagagcatggcctttgtctaactgagtcaacactagtaaaacccatccactataaaaacacctccttaggaattatttccagcagtataagtcattatttcagacaaaaaattaagtttattacttcaaatacatttttacttcttactaaatttattagaagtaataaacttaataagaactaataagaactgaagtactattcaatgttgatcaaagtatatctaacttaagcagaacgagggaatcatcagtaagaacagaagattgacaaagccaggcactctttgcctgtggagttgaaaggaagaggcagagtcttggcgattactagtaacgttccagaaaactaaaccaaacacaccaaacaagagagaccctgcgaaaaaagtgttctcttccaaaatatgatcaagtgggacacttgaattgacgagaacaggaaaccacaaagaatcctcttctaattatctctaagcgtgagtagctggggggttgagaaggatgggagaaatgtctccaccttcagcctggatggagcagctgtttcctaagtgataagcacctctgagtgtgtgatatctttgggataggatactgagaaagggctttgagtttaagatgagagtcagggccaagaaaggcaatgtcataggtaaacatataaaatcaaataatataaaggcaaatatttaagttactctaaaatactgatttaaaagtaacatttaaaagaatgcacatttactatttgtctaaagtgaactttaaaaataatgaagcctatttcccggatataagagcaagaaaactattgaaggatttttttttccccaaaggaaaaataatccatgtgactcgttcctcctgtataattgggaggcttgtgcatcaccagccctagtgggaacatgaattttagtacagctctttgaagtgcttaagggtcttatgttagaattgaaaaatgcacaatcaaagttgtctagtgacaaaaagaaggggacagccatgtgcatttcctggaccagagattgctgactctcctgaagggtctccatttaagaggtgacaactcgctatcagctgggccatacaccctccctccccttccggtggggcgggtcctgcaaagctgtatcccctgcatgtgactgacccctagtggttatagggaccaggtacaatacagtaaatggggccaaagagtattcttagcttagaggacgatagtgacgtgtttggtaactagttattttcacaggctgcaatgacactatgcttgttgtaccttttttaataactaaaatgcttaaaagtttaaaatgtataagtccattcacgtgaaaagactatatggaaagataaggtattcttacatatgaagctttcctttttagtcaaactagggctttttctcccaaaactaccagtttacataaatcattttatggccaaaattcaaaaacaaaacctccaaacccagcatttctttaattttattattattttcattttaaaacaaccaaaataattttctgcttttcaatatgatttctgtaattctggtaagaatttgtgtatacttcatagcagtaaaaaataagtaatttaacctttgctgacttcgtatgttttattagaaaatgatgatgacaataatgatgaatattttactctgctaactatgttagagattaaagatcatttattaataaaatgatgatttgcaatcaggctaacaattccttttattacttacataattaatacctaaaaaattcaacctcactgcaataggaaagtgaacatttttaggtttgcggggtgcacagaaacctttccggcaggtccagctgtgggacatatattcacacacatgcacactgtttgtgtgtattgatagataccaagttatactcagtatgtgtggatttgctcacatctatcctcaaatgtaaaacacaaaaatattcttggaaatgttagcctctcagcaaattccaaggaaaggtttctgttattacccacatcactatgaaaacatacattactaccgaattctactcttcccatacacaatgcttcatgcttaaattgtatattcataaaaatgccaaccttaaagaaagagataatccaggctttacccaccgcaggtgccttacctcggcagatgggcctgtggtcactccaagcagcgagcgtctctgtaactctctgacaggtgatgcttttagatccctggagcacgtaattgtcctcacatgaaaactgtacatttgcaccaaccctaagccgttaaaaaagaaaaaaaaaaacccaaattatttacagaagacttctttaggaaaaaaaaaaaaatcagcaaaatggctgctacgatcttgttcagttaaaacagcctaagacattaagcaactcattaggtagtatgtatagaggcaaccctgtaatttagcaaaggttataaaatcaaaagacttgggttcagattcctgttgtgccagcttcagaactaaacaaacacatgaaccttaacttgtcatgactaagacagaataaaatagcaaaaatgacttcactgaatagtgtggctttaataagaaaataaatgtgaagaaattttgtaccctgaaaacaagaggaagttggatgtcattcatcgtgaataaatattttacaaaaacaagaagtaaaaaagtctaggttaagaaaatatgtcagtaaagactgtattttgctatcacacatgttaattatatttaaaagaaagctagtgatatttcagaaattcttataggaacagaatattttacttttcttttgtttgtttgtttgttttgttttgagacagagtctcacactgtcacccaggctggagtgcagtggcacgaccttggctcactgcaacctccgcctccggggttcaagctattctcctgcctcagcctcctgagtagctgggactacagatgtgcacaactaggcccggctaatttttgtatttttagtagagacagagtttcaccatgttcgccaggctggtcttcaactcctgacctcaagtgattcacctgcctcagcctctcaaaatgctaggattacaggcgtgagccactgcacccacctgtgttttagaagaaagcaatccatccagcctggatttagagaaaaaactgccctggctccagagctgcatttgcaaacatggagctttacggttgtaaacattaacaagacactgtcacagaacacaaactggacagctgcattcaaaagtgtgagaggcagagatcaggtttgaacaccacccagttacttcttctgagcctggcttctggcattgaattaaatgtaggcttatttaactctctgacaagcgcattgttacaagaggaaattctactcatgtttttagtttgagaaaccacgggttgatgttgaggaaacagaattgaaataaggagatgtgaaggaaaagaagcacagttgtcagtgtggatggatgaagttaatcatagagacaagataggggaaacataaatagatgctttcctttcttgcttagtggaaaaaaaatccatatctataatatcagagtgaatatcattcaagtaacatcgcaccagcatcccccacggcatctatgtaacactctctagggattgccatggatgtcggcaacagccatcaaatcagagtcaaagcaactgggaaaattctaggtaaacaaaattaaacacatttcttttctaaaggggcatctcatcttaataaaacttaatatgcaaaagcttattttagaaaataatgaagagaattcaaaagatgtagacttttccagatttatctgtctaggaagttctttttttcaccaggaatctaggacaactagagttctatggaactaattttgagaaacccggcatcataagaacataatatgtactaatttgaaatgtgaaaaatacaaaaaaacaaaacccagtcgtgattcccattttcattgctagccatcacagttatttaagatatctgtaattgtagacatattctgccgccatcgtttttgatcattggtctgtgtttaaacctcatttaagaaattttcttttaaaaaattgttatatctttgtgttttctattccaggtatcagtctccagttctttctgtttacctacattttaatattcatagttttcatcattctttcaatatattgtcattgaacatctgctatgtgtcacactctaagtaccaaagcggcagaagtgaatagcacaaagccacaatctcatatagataacataatagttaagaaagaaaaaaataaccaaaccaaacataaagaaaacaaaaagtcataaagcaccatgaagaaaataaataaaatgacatgagagtcctcgggtaggaagagttggaatttcagtgtggccacttcttcaatgatccccttaacctgaggcactgatattcagtgtaatattccaggggagttcaaacagaaagggagggatgggggaagcattgcttcaacttagcaagcactatatttcaacgactgcagcacaccaatccttagtcatggagggctctctgctcctataacacctctatctttttcatgcatttttttcctacatccaaccaatattcctttacgtatcagtagcaaattgtattctgttttgagaaaaacaatcaataagcctaaacccccaaagcgcagacaacacaggcaaaaacagacaaacgagatgacatcaaactaaaacccttacgcacagtaaaggaaacaacaaacagagtgaagagacaccctgcagaatgggagaagatgctggagaacaaaatacctgctaatgcgttcatatccacaaatacaaagaactcaaacaagggaatcacaagaaaacaaatcacccatgtaacatatgggcaaaggacctgaatagacatttctttaaagaagacataaaaacgaccaacaggtatatggaaaggtgctccgtgtcactaatcatcagggaaatgcaaattaaaaccacagtgagatatcaactcacacctgttaagatggctattatcaaaaagacaaaaaataataagtgttggtgaggatgtggagaaaagggaacccttgtacattgttgttagaaatgtaaaatatgtaaattagcatactcattatggaaaatagtataggggttgctgaaaaaattaaaaatagaactactacatgatctagaatttcacttctgatcctatatctgaaggaaatgaaatcaatacgttgaagagatatctgcactctcatagtcactgcagcgttactcacaatagccaagtcgtggaatcaatgcaggggtccaacactggactgagaaatggataaagaaaatgtggtgtgtgtgtgtgtgtgtgtgtgtgttcacgcgtgtgtgtacacaatggaatactattcagccttttttaaaaaagaggaaatcttgccatttgtgacaacacagttgatcctgggggaaattatgctaagtaaaatgaaccaggcacagaaagacaagtactgcatgatctcatttctaggtgaaatctggaaaaaatagaactcccagtagcagagtgtgggtatcaggggctggaggaaggagaggaaacaaataatacaaaatttcacttaggagaaataagctcaggagatctactacacagcatggtgactgtagttaataacagcatattgtatacttgaaaattgtctggagagattttgaaagttgtcaccatgaaaaatgacaaatatgtgaagtaatgggtatgttaattagcttgatttgaccatttcacaatgtattcatattccagactctcatgtacaccataaatatctacagtttttctcaattttagaaaagaaaatatcaccactctgactaattgatttcatttctggcaatatatgtttatcatccaaaatataggaaatttctggtgatattcttcagaagacattagagtgtccaacaacaggactgtgcttgactaaatttttttggatatatttgaaagaatgcaacatcgctttataaaaggcaaatataaaatatatgtagcaataaagaaaaataaaaatgacatgtagtaatatagaaaaagaaaaaaggacaatacaaaattgtatgtactgaaaataactatgatctatctatatttatatctaaatattaggaagataggcacaacccatttttgagcggtagtatcacaagtatcacaatacaaatttttgtttatatattcaaatgattatattttttcctgattctattactttataatttaaaagttaaaataaaaacacttaggctgtttctattagaccgttcctttcttctcacccatcaaggtagtcatgtgcactctccaggacctgaactcggctcttactcttctcagatttccaccaaaggaaagttttcaaagactagttcagtggagagcggaggattgctcctgagcttccacaatcatcacctggtatcacaagctagtccagaaatctctgcgcacattcatattcagtacattgagagtacagtatagaacacattccataattacgatcatgaaacctttttgcaaattatcggaaaaagccatcaatagaatatggaagcttctctaatttcaaagcattaaaaatattaacaggagcaacctcttcatttgattgcagctggcaaacagagccaatgtgggtaaacgccattccagcagcacagccgaggaggagactccacgtgggaataaatcaagttgaggcagaaactaaataagaccccaattctaatttattaattcaatcttttgctctcattttatctaacacatgaatcagttcaatttccaagccatgtgtgctttcgatgtcgaatatataataaactaagttttcactgatttatgattactatatttgaagtaatataaatcagatataacatcagataatctaacttggttttctggaaagaagtctcagaggaaaattccaggagaaaaaagctagcagtgcctttctattggcaagttactttagtccgccctagattaattacgttgcacaactgagacaattgttagtagttagtaactgtaagaaatactggagaaccgattttgtgtaagatcaagatacatggtacattgacaataaatatcacacagcaaaagttaactcaaacaaagcagcaaaattttgacttttcaattaaatacaacagggaaacatacattttctgcttcttcaatgcttaacacttctgaaattgctccgtatttgatttcggaagacatttatcaccatataattcactttacctcagtataaagactctttctaagtgagtaaactatttccaaacacgctttagttgtaatacaagcaatttctaaatatggttctcatagagcataactatttgagaacttattaaacattggtatcataactatttttgaaaaataatttgaggtgactcgaagattaaactaatgttcaaaacaggaaatgggttgacttagctgtccgctgtttaccagagattacactaatctactgactggctaggtaaggatctcctacctctcttttcaacccacactgctcagcgtctactgaatctgctgatgcaaccaatagatagatgagagatagatgattgatagatagatagatgatagagagattagatgacagatacacagataaacggagagacagatgatagacaaagagatggatggatggatagatggaaagatggaaagatggatagacagtggatggatagatgataggtacatagattagatagataaatagatgatagatgaatagatggatagatgacagatagctggatggaggaatatatggattagacagatacatagatggatagatacacagatgcatggatagatgaatggatggaaagatagattgatagataaaagacggatggatagatgataggtagatagatacataaatagatgacagacgaatagatggatagatgatagatagatggaggaattgacggattagagagacagataaatagatggatagatacatagatggatagatagatgaatggataggtaagtagatatccatctggttaggtagatagattgacagatgacagatagatggacagaaagataaacaagtggatagatagatacatagatggatagatagctatagaaagacagatatatatctttctgtgttaaaaagtccacttcaaacatatacttcagtactcataaatataaaaggaatatatatatattattaggtatcgaaggtaggcatttaaacatttttgcatcttcagcaaaaagaaaaaatacattaggtaaaatgtttttcagtctcaagcagcagaaaacacaaaaatttgaggaaaccttttcttcagcgtgacattcaagcctggatttgccatatttgtccttgtaaaatggagatggatggcatgggggcagtagctgcagccacactttatcaaaggtttagaaatgttgcttgaatgaaagtatttgcttaagaggaacaaagctgtgagcaggaggaagggtgaatgctgaagggtctatgtgtgtgtttacgtgtgtgtgcacatccgtgtgtgtgtgcacatccgtgtgtgtgtgtgtgtgagtatgcacagctttgatttttcttccccctgtattttactaaaactctgaggacttttgtcctagcacagcacacgttaaaagttacagacttccaaattcacagtgggatccaggtgtacatcatgaaataggtgtaaaggagatgtgatggtaggttctcccacttcctgcttctccactataagaaataaagtcaaagcccacagtgtggaatcgatgagttgcccaaacagcaaaggtggtggcctggccctccccgcaggcaccccatcccaaggagaagtcagaactcctggcctgtgcttggatataggcaggagaggctggaagccctggctggggggtcctgcccagtgagaaggaatggagctgagtcctgcttaaagcggtctggctaccgccagaacttgtcactggagctgtggtgataagtgtgatggtggcgtggaggctgtggaagcccagtgtcatgtttccccaccatacttgggaccaagacccaagctgggtgaggagacagaacaagacagaacccccgcgttgtgtctgtgtgttcaggagtaatgcaggactccttagttcccagctgtggcctcatggagaagcccctgtgtctcctggtgcttcatagagtctggagaaggtgggaggagcccgtgatggagaaggtcaagcccatgagcctcccccaggtccacctgcctccagggcagaggcctaggaaaggttatgactgggagtgagtggcacaggcgggatggaggagagatgcctgctctcactaaggccaaaatgccctctccacagcccgggcccttaacgtccttgagagagagtgaagggatgtccagatctgacttttaacctgcttcactgggaaatcactaattttaactcttttaagaatgaacagataaagttttctgactcagacaaaatgaggatcccacaaaagaaattaccaatcacagtacaaataaaactacattttatacatcagaatttatagacttattaattcaacttcatatatccattttaacttactttgcaaataacactgctatccttattatatatgggtcattctcccatctttgccatctctttctccctatctccctctctctttctctatttttctctttccctgccttcctccatcttacttgattttcacattaaaacactgctttttcccaatacgtagaatcagttatatggggagtttcctgaacaaggtgctaaaaagttttctggaaacgctattagaaagacgacagtgtttttctaactttagagcaacagagtgacgtttgattcaagaaaaggaatgagagaggaaaaaccaaccagaacacctccaatatctaatattcttcagcatcttgaaaacatttagctgctcctcactcttcactcttttccatgggcctctgctatgcccgacctacaggggtttggcactcatttacggccgtccccaaatgcaccagacatgaggcgagccctggaccgtattaatgagctgctagtgtaagagatacttcatcaaacagctcttggtcaatatattaaatctaaattgctatgggaatattaacaaaaaagaactgatttgcctttagtaaaaagataagaagaacttatgctggaaactgaaatttgggttacgtcttgaaagatgcatagaatgtattttttttttccaaaatgagtatatgtgttatggattaaaaaaccaccacagcaaaaccctgttggtaacaaagctgaggtttgttcagacaattgcatataacttggtttgtccaggaatgtttttcaaaggttatttccattaccatggaggctatctcctaccttcctgttttgaagttgcacggtgtccttccccagtagatacaatgacttaggtttataccctctgcctccacctcacctcccttctctcacttctgaggcatataacttagttcctttattgctccatctcaggtttagtctcaggatattaacacaaagcacagaagtatggaagagtgggaggcttgggagaagaggccggttgggaaggtgttaacctccgagggaaccgcggtgtgtcattcaccttgaaatctctcacagcttccagcactgctcatggagcttctgagagccctgcaataaatacctttggaactaatgtgagcaaaaaccaggaggcagaagcaggaattcagaacatctcctagatgtggaagaagcctctgaactgaagggctttaggaagaaaaacacaacccggcctctgtgtgcagtctctcagcatccacgcggcacgtgaacccttgggaacattcatctctattttaaaataaatgctttaggtatcctctccgattgtcctataagggagtttttacactactcagatgggaacttggacaattcaccggatggcctctgctgagggatgccccttagggacacgatcctaataagcaagaccaggaaggctgggaagaccatttgcaagcaagccagccacatgctagggaaacaatgtcccattgtgtgacttgctcagcattccagaaaatgccatcatcggagagatgaatgtgcatctgctgtggatattgaaatgccttttattacccgtttgactttcacacataatgtgtcttttctgggtcattttttcttttcatagcggcaatttttagactcatttcttcaagccttaaggcagtttaacaccactaaaaatgcatcagagagtagatggaactctctagcctgaggaaagaaaggaaactaatattttatgtgatttttagatactgtgtgttagcaatagcccaacaaagatcccttaatgacaatcaaaatataggatggttccagggtataagcaacagtaagcttggagtgattggcaatttccagctgtgactagctctcagaagcaccgcattgacaatgaggtgtgaatttttgtgtgagggaatttgatttaaatgttccaagttatgttataagttcatgtaaacctgccatttgctaaacaacaggactttgtcatgcgaagtagaaaaattaaatcctcacgttcacccacctatctatacaaaggcaaaagctgtttgcacactgtgtgaacgtggaagagggtttggatgcagccaggactgtggggaatcatggcttgggaaggagctttgcccgcaagcccctctcccatcttcttctcttttgtgtctccctgagatccaaggtgaaagcccctttgcctccttcctgacaatttatcagggctttgaggagagcaacgtcagtgcctattttccacgtgggcttaggaagccagaggagactcttcgaactctagaccaaaaggcgttttgcggatcatgctctttgctctgtagctcgagggaggaaacagtgaggagtgtcggaggcagagacatgggagaaggaagcagagctccagcagcctgcaccaccgccccggcagcctgcaccaccgtccagctcacacctccatcatgcatcagcctcacacaatagcagcagacatgagtttgttttacttcatgaacatgcccaggcagcagctggagctaaccaggtacagcatgcagggaagtgacatatattactaaccactcaggtcagggcagacctttggggcctccacgataagtcaacaatggaggaggctgattcccaaatcacagatgagaacgagagactcagagggccctctgctcagcatcatgggatgctggattcaaatgggctttctttttttgtaacttgggaacttatcacttaaatccgtggttgatcagtaaacaatcctaaatacacagagactgttcggcaaatatttcctcccgggcttatatctacacttggcaaaactttgcaattttttttatttatccttcacatctggttgtttgtaattgaccagcaaccacagtatccaggcttaaggagcaccacacaaaacaagagccaggagggtgggcaagagaagaaaacactgctataattcagggcacacacaaacacacacactcacacacacatgcatacatgcataccagtaatcacatgagatccaaaagcatgtttacaagacactaaaagatgtgaatatacttgcaccctacagaagttggcacaatgcaagcgctcagcaaacatgcctcagtttccaagtgcccctcttagcagcacacttctgcctgccttgtttggtgcaatggctcactctgtttctgtggccatgaatccagaacccaggtgctgatgccacccagagccaggagccctgcaagatattggccgataaaacagagccacctcacccaaacgctggctgcactgagcctgctgaggctctggcttcttcagcagacatatgggatgcccaaaatcagagggaatcaatgccccaggggtcatactttgagaaggggacacaggaactgagaggactcatggtaaacatcgggccccaggggtacacccaggctgtctagaggcaccggtgagacagagcatctccctgggctgattctgaagctgagcacagcttcccagcacgtttggcatctctgtctggttccaatttccctcactctcgcttcactggaattaaactgcccctaaagctgatttctatggaatcccaaataaagtagggaactactttcaatgcaagccccaagacctagagaagttattttcaggtcaccaggctattaaatagttgtaaataaaatgcagctgagataaaacatgagccacatgtttttctcaccacaatgcaaggtactgaggccaagaattgtcatttccatatcatacttcttacaactctgaacacagttcttaaaatgtctttgcccagcacatatacaccatggaatactatgcagccataaaaaatgatgagttcatgtcctttgcagggacatggatgaaactggaaaccatcattctcagcaaagtaacacaagaagagaaaaccaaacattgcatgttctcactcataagtgggagttgaacaatgagaatacacggacacagggaggggaacatcacacaccggggcctgtcggggggttggggactaggggagggatagcattagcagaaatacctaatgtaaatgatgagttgatgggtgcagcaaaccaacatggcacatatatacatatgtaacaaacctgcacgttgtgcacatgtaccccagaacttaaggtatattaaaaagtttttctttgtatatctcctctctttatcatttgccctacttcagcccaataaaacactttcttcttaatacagtttatttttctctaccttatattaatcttgggtcattcctagaaataaaatcatatatttcctaacgcatttaacaaaactaagtaggaccaagccaatctgagaaaagggatcctgtggatatcagaaaagagggtgtctagggaagttaatgctaaaattatactgtgctgtgtagatgcatgaactccagctgtaaacatccccagaaaaacagacctgctcggcttcctcgcacctactttcctctatgtagttatgcatttgatggctggtatgtttgctttaacttcttgtcatttagatccagcccttaatgctcacgtcagtctctaggagagaaaggcagggaaagattttccctcagggtttttacacaggctcttcttccttctgggaccgaccgccccataggctcaagtggggacatcctttccttcccatcctccaagccctggctgtgacgtctcccctgagccttcctctacgctctgtctacaacagaggaggacttttctgttgttccttcttttatttgtcctcatcccaagagctcagtacagttcctgagggcttgctcattttgctaaggaaatgaaagaatgaatcagtagctgaagggttgccttggatgctaaaaacctccctagagatggctccaggtagtgatttgtaatttccccccgccccttcttttgagaacagcagatacaaagcacagaaaagctgaaattgggccaggtgcagtgactcacgcctgaaatcccagcactttgggaggccgacacaggtggatcacaaggtcaggagtttgagaccagtctgaccaacataatgaaaccccatctctatgaaaaatacaaaaattaactgggcatggtggagtgcacctgtaatcccagctactcaggaggctgagagaggagaattccgtgaatgtgggaggtaggggttgcagtgagcagagcttgcaacaatgcactccagcctgggtgtcagagcaagactccgtctcaaaaaagaaaagaaaagctgacattggattgcaattgcttactgctgtgtgtgtgtgtgtgtgtgtgtgtctgtgtgtgtgtctgtgtgtgtgtgtgtgtgagatgagggatactgtatatatttaaaggtcctaaatgataaacaaagtgaaatgattactgcagtcaagcaaatgaatgtatccacctcctcatgtggctacgtgtgtatgtgtgggtgctgagaacacctgagatctaccctcttagcaaattctcaggatgcaacacggcattattaaccccaactcagcatcattaaccccaacgcagcattattcaccacaatatagcactattaaatacaacacgacattactaaccccaaagcagcattattaaccacaacgcagcattagtaaccccaacgcagagttagtaaccccaacacagcattagtaaccccaacgcagcattgttaacccccacacagcattgctaaccacaacactgcattattaatcacaatacagcattgttaattaaccacttcatgctatacatcagatccctaggtttattcatcctatgtaactgcagctttatgcctttaacaacatctccattttcctttgagtatctgctgcatgcccagattggcgccaacctataccttgcactcctctcttctttcaccaggtggtccttcccgcttggcatgggcaactcccacttctttcctcctgtctttcatcaaaatctgctgggagcaacagatctgacaaattctttcatacacaagaaagtgtaatggagtgagatggttgactaccttccccttccagaggaagcaacatttcggcacagcaggacgtcttaaagcaaagtgtcggtctctacaattcattgatggcaagctcctggcagcatcattgtgagggcagggaaaatgaccaccacaagaggcacctcctcagctcatcactaagggtagagctggttctgaatgcttgctgaacacttaagaaaagtctagcaggtaaagagagcgaggaattaatttaagacacacacacacataactgcaggtggcatcagcaagctgaaaactgacaaaccattgcttcccgaatctttccaggtatctgtctgtctttctccttttctccttctcctccccattagtataaataggaagcttaggtaaaattcctcataaaatttagaatttggtgccaaagggcatttaatgctgttgaagggtggagtgggtggatttattacctttagatcctagttaaattgataaaccatctaactagctactctatttcccctagaatatgaatacagaaacttaagaggtctctaaaccagcagttctcagcaagggtcaagtgtatcagaatcattcagggttgattggaaaagggacgccaagtgtcaaagactaccactcagagactatgaaatgtcatcctggggatagggtgctcccatttactcacccagcttgccagtatattctctacgatggcaagcaagtattattgctggtggcagtggaaaacgactggtgaccccagatgataagagacagaaaaccattgctctggtctaaagcgaaagtctgcaggggcggtaattttactgagggatccaggcacccacctctatccccactctatcacaggattcagtcataaatagcagtcattgttcttccatgaatgttttgtaacattcatatgcatgttttgcaacattcatatgcatgttttgcaatattgcaaacacagtattttattaattaaataaatgatttcaatacaataaaaaaatggttttgctatgtgattgaaaatgtggatagagaggaaggaattgattgcaatgtcaagaaatgtaaagaactattccaagggggtctctgtactaatctctatgtgcaagaatcagctatgattggacatttttcattcatcccgcatgatatcgtggcagcaagcttgataccaggtcatacatgctagaaacctccatgactcctgtatatcactgctagatgtaggtttgcctctggcttctgagatctaccagtgctgcatcattgtgtccgtgggattcctgttcatgggagctgctcattggcctcacatctttattatttttccaagaacattatttgatggaggccaagatttggtaggatttttgctgcggggaaacaaatcagctgtccttattcttccagcttctgcagacatataggagctgtagaaggcagcagatactgaaagtgttttccaacgatgaggtttccatatacattatcagacgatgtttatgctatcaaacaggtttagaaaagcaagcccatctgtatttagtcacctatctctaatctcatatcacggatgacatacaccaggcaggccaatggttaccaacctcgcttgcacatcagaatcacagcaggcacttataaaaggtctaacattgagttacctacactagtcaccacaatctactgtagaataagatgctgcaaaattttcatggctctgttcagcagcgtcaacaaactttaaggctaatggaagcctgtgaaatcattggtaatatgcagaagagttatcaactataggaacaatattaaagcagtgaacattgaataacaaccagtgcattgatttggggaccattctccctgctccctaatgtttccaattcgtttaaaaactcttcagaatctcaaatgattcattctgtttccccctacgtcttcaccagaaatgtgttgaagcaaaggagagagttagtgttcacagatctgccctagagagagagagggttatagcacattctgtctatagtgatcacgttcccaggaacaggaagtacaatggtggctgtcgggagatgtgggtaggggaggatgggaagttatggctttatgggtatggagtttcagttttgcaggataaaaagaattctggagatggatggtggtcatggttatacaaccatatgaatgtgttaacaccattgaactgcacacttaaaatggtcaggatgctaaattctatattatgtggattttatcacaattaaacattctctttaaaaatcttcatgactggtccatcttcctgaccaattaaaccagaaccttcggggtaactggagtgtgtttaattgcacagtttagagtccccaggaaaaccagatcactttctctctagggcagatcaatgaacactaactctcttctttccttcaacaaatttccggtggaggcatagaggaaagcaaaatgaatcacctgagattctgaagagattttaaaggaattagaaaaattagggagcagggggaatggccccaaaatcaatgcactggttggtcattgaacgttcactgctttaatattgatcctaaactcttttgcatatcactgatgatgatctcacaggcttcttttagcctcaaaggttgttgacactcctgaacagagccatgaaatttttgcagaatcttattctaaagtagaatatggcaaacacatggctaagagtcacagggtgttataattctaatgtatggaagaaataatcacatctcctatttcaacccattcttttacaggaagaattacacacacacacacacacacacacacacacacagaaaaagtgttacagaaggtcattttgaagagcatttatattcaaatagtccccgagatggcatatctgatgatcatgacaaactgggcttttgttgataattcatcaactatgttttgtattttgaagctaacaaattaatataggctcaagtaacaatcacctattttctcagaagactatttaaatgtgtattttattttgatgaaaaaattacttttctactacagatattgaaaagactgtgtaagagagagggaggatattccaccagccctatttggtgaattgcttatcagaagcaagtttagccacacaaatatgatctgaaacattcagagtgtgtcatttttcaaagggacataaaggcttcaaggagtgtcaatgggatattattgtttgtggtatttcttaagtagttcttaaaaaatgcagttgatgctctttgaaagagcagtaatcatcggcaaatatttttcctactctgcttcagtttcctagtaaccatgaatcctccttcaaaagctacctgcctgccttcagttacaggcataggaatatgttatgttccttaaaattttttttaagttgtgaaaacactttggacaatggcaggggacttaggcgcggcaggctcaaatacagcacgtcaggaaaggcttgcgagctaaagcctcctttctttatatgacaaacctggactgagcgcccaatcccactttgtcctccttcaccttactgttttctccactagacaagagagtaaaaatcacttacagaaatgaacactggttcaagaaataagatcatgtttgagtttcaaaaaataaaagacagttctttgtcttccacttagggacatggaatggaaacggattatgtcacaaaggggatttttttccaacaagaaaccaaacttgaatgtttttaaaattccctcttgtattcattatagtttccaaattttcttaaaaaaccccctgatatatgggcttgattctaactttacaaatgtttcatctattagtaaactaaattttttagttgatgggaagaaggaataacaatcataatccaatgatgtccatactttctactttttcttctagttgtacataaatgatctagcaaatggccaaggcttaatgcttaatacagtatatgatgcaaagaaacagcagcttttttattgggaataattatgttcttacaagtttacctgtaaatgaaaattttgcatactgaatcaatatttattgttgccttacaacctgtaaatgtaaatgcattcctgatataaaagtaaaattaaataacttagtgaataatggctgaatgcttccttcgaagcaggctctgtactgaacactggaaacatgatagtgaataaaacaaagttcttctctctacggggctcagaatcttgtgggcagatagaaaatatataaacatgaattatgcttagtgaaatcaaattggaagcatagacgtgcatagaatttctggctggtcagtgctagaaagtcaaaggccagagggagggaggctgcggggggggaccaaaggtccatttcagattgtgtggccaggaagtagcacggaacaggtacctcatggggtgatgctccgaatcttaagatctggattttctctggtcagtatataacacatctcttagcattgctgagaggacagaagatgtcaacatatcatggaaaacacgagaaggatcatagaaatgaagacgtgctaaagaggagagccaataccacataggataccaaccgagatatcagtgtatgcatctgctctaactttataagtatatgaaatctataaagtatataaatgatgacaaataaaatagtaagcaagaaaaggaatcaaaggagccaaaaagcaggtggaaatacaggaggggaagagctagaggtccctagatatctctccattattctctgcatcaggagagaaacattataacatcagtgcccttggacacatgggcataacctgagtgtgcagttttattgcttgtggtatccaagggcatcaacgtgatagcatttctctcttgatgaagacaacagtgagagttatctagggggctctagctacctccacgctctgtgttcacctgcttttgggcttgggcttgtttgacacttttcataataaaatttataatgtgcctttggtttccctcatttcttcatcatttaaaaaaatgattcaataacacaacttaaaagaaagcagttcttttgtttttttcttttgaggagtcactgctggagtgcagtggtgccatctcggcttactgcaacctcagcctcccaggttcaagtgattctcctgcctcagcctcccgagtagctgggactacaggcgcatgccatgtctggctaatttttgtatttttagtagaaacagggtttccctgttttgactaggctggtctcgagctcctgatcttgtgatccacccgcctcggcctcccacagtgctgggtttacaggcgtgcgccatcgcgcccagatgaaagcaattcttactgaaaagaacaccacatttactccctggtttctacacagtccataagtgcaattctttacattttcatgtaacaagagacaggtgcctctgctctcgctggagttgacctacaatggagaaataataaaaccaatgcagcaatactataataactataaataaaattatcaatacgctacaaaaaattaagataactgaatgtggaaactagaaatgagcagttgtttatcacaacacatgggctatggatttgtttctgcttcttattatgtaatttttttccttaatgtacttcagtttctccttccgtttgatgacacataattcataaagcatatttcaaaatagaatgaaaaataaacatggtatcctcgagataaaaatatgctaagacaaagaacagatgttattagcatgaatagtaacatgcacataccaaggacatacattaactattcagtttttaagtcataaatagcactctttcaacccccaaattccctttagagcctaggttatgactctaattttaattgttaatctattctctgatgagcagtgcttaacttaattggtttagcagactattaatgaggttatgtccatatatccctagagactggcttgttagcctcagtttaatccattcaacagaggagtcttctgccttgtgtggggtccggtcatataaaatcaaatcaataaggcgtctcccctttcctacaaaatcacatgattgtaatgagatgatagtaacataaatacatgtataaaactcaaagatgctaggaaacgttgaaatcgggaaatgacaagaagctgggtgtaaagagcccctcgttctgcagagagaagccaaccgtgtgggtgggggaggacagagatgggccaaggtgcagtcacttgtcttttaaggccaggatgcagtgtgagaaatgcattgttaggcaatttggtggttgtgcgaacatcacagagggcccttacacccacccagatggtgtagcctgatacacagctgggcttcatggtacagcctagtcctcccaggctatgaacccatacggcatgttactgtactgagtactgtaggcaattgaacacaatggtaagtgttcgtatatctaagtatacctaaacatagaaaaggagcagaaaagatatggtatgaaagacggaagatgtctcattcatatagggtactccctatgaatggagctggcagggtggaagttgctctgtgtgagtcagtaagtggtgagtgaatgtgagggcctaggacatgactgtacactcctgtagaccttagaaacactgtatccttgggccactataaatttattaatgcttttctttcttcaataataaattaaccttaacttactgtaacaattttacttcgttacaattttttttttttttttgagacagagtctcactgggtccccaggctggggtacagtggcgtgatctccactcagcgcaacctccacttcctgggttcaagtgattctcctgtctcagcctcccaagaagctgggactacaggcacctgccaccacgcccggcaaatttttttgtatttttgtagagacagggtttcaccatgttggccaggatggtctcgatctcttaatctcatgatctgcccacctcagcctcccaaagtgctggcattacaagcgtgagccgccgtgcctggcctaccgtgttacagtttttaacttgtgagttttttgcaataatactcagtttaagacacaaacacatagtacagctgtacaaaagtgttttttcttaatatttttatttcacaagcttttttctattgttctttttactttctaaaccttttgttataaactaaaacatgaacaagcgcactagcctaggcctgcacgacgtcaggatcattaatatcactgttttccacctccacagcttgtcccactgggaagtcttcaggggcaaggacacacataaatgaagctgtcatgtccaatgatcacaattccttcttctggataccacctgaaggacctgcctggggctgtttacagttaacttttgtgttttttataagcagacggagtatactctaaaataacagtagaaagtataccattgtaaatgcatgaactactaagacagtcattgattctcattatcaagtatgtgctagccttttctgtgactggcagcacagtacatctgtcttacatcaagactgccgcaaacatgtgaggactgctctgtgctgggagggagcagagctaggagatcaccaggcaatggaaatctttcagctccattaaaatcttaagggaaaaccatcatatatgcagtccattgttaggcagtgtatgactggatattctatttacaaaaagaacaaaaaattttacggagaactattccatatcagtcggttttgcctattaaagcccctcctctgtatctccattaactggcaatactcctttgtggaaagactcaaatgagaagaatcagcatggctggtgttggtgtggcagaaaggagatgatacttgaggaagaacatgactaagaagtaaaggaagtagccaggcacagtggttcatgcctgtaatcccagcactttgggaggccaaggcaggcggatcacttgaggtcaggagttcaagaccagcctggcaaacatgggaaaaccctgtctctactaaaaatacaaaataattagccagccgtggtggtatgtgcctgtaatgccatctactcaggaggctgaggccggagaattgtttgaacctgggaggtggagaggttgcagtgagccaagattgtgccactgccctccagcctgggcaacagagcaagaagccatctcaaaaaaaaaaaaaaaaaaagtaaaggaagaaagacaggacactgaaggtgggcaggtgccacctgcagaggaggtagtgtcaggacagatattgcagctcatgcagaatcagggctgtggccacatggagctctttatggatagacatgaagggggccacattgtggaagaaaagagaaaagggacatggaagcagttgagaagctcaagtttcagagaattcagggagctccctaagttcagtttcagcatctttgaaatgttcttaaaaggatagaagaatttgaaattatatattaaaaaaatatggctgggcgctgtggctcacgcctgtaatcccagcacttagggaggccaaggtgggtggatcacgaggtcaggagtttgagacgagcctggccaacatagtgaaaccccgtctctattaaaaatgcaaaaaaattagccgggcatggtagcacacgcctgtaatcccagctactcaggaggctgaggcaggagaattgcttgaacttgagaggtggaggctgcagtaagccgacatcatgccactgcactccagcctggacaacagagtgagactctgtctcaaaaaaaaaaaaaaatcataacgtccagcagtgtgcatcacggccaatgctagtctatgtggatccgtggtgccaattacaacatgacacaccccttgcagtgatcaattaaaccaagattgtccttctgctcagcatatgcaatgcatgctaagctgcagggcttggaatgctgagctcaagggcaaatttcaaccataccttgactcctcattggctactttgtgaagtccgcacactacacacccctttccagcggtcctgcatagtgagtgtaaaaacttctattataattatctgtgttacaaactaccaaggtcaatagaagctttgatatcagtaggatccagctctgactctgacaagatatagcactttgttaggttagcgttctgaatttcaacgcttctacttataaacatgaggataattacatctgcctggacataggctacatatcctgttagcacagaaagacagatgaacaatagatgacagtacccacccataaattctcaataccaatctgagctccctccctcagatattggtatttgaatacttccatcaatcttactgataaatattcaattgtgatgaatacactttgtcttttagacagtggtctatggtgaaaaatactgtcagcaaactgtccccaaactgacttgaattcaaataagcaagctttgtattttatgctttattttcttcgggtattttatacataatgatagaattaatatttaggttgtctacggaaaagggatttctcaagaacccagaataatactataaatgaaaccagatgaggaatattttaccagcctaaaaaagtgaactctttttaacaaaacagccccaagttacatatttacaagggctacactgcaaatgagctcatctacgcatcttggccttgttggttgttagtttggattacatgttagtcattagttttgattataagaatttaaaaaaaaaaaaaccgaattacctttcattaaagagagtctcaaaagaaaagactgttaaaaagtatcttccctttttttttttttttttttttttttgagacagagtcttgctctgtcccccaggctgaagtgaagtggtgcgatctcggctcctgggttcaaacgattctcctgcctcagcctcccaagtagctgggactacgggcgcacaccaacatgcccagctaatttttgtatttttagtagagacaggatttcaacttgttggccaggctggtctcaaaatcctgacctcgagattcacccaccttagcctacagcacccagccttccctccttttaaaacatcaacatttgtaatgaactgattatatgagaggcccaccatgtgtcatttcatctaagtgtcataaggcatccttacttggctgtagtccagcagcttccatatgaatacaatgggttttactatcccatggaacataaatagtagatataaacaataaatcgatatgtgggctgggcacggtatcagtaattccagcaattttgaatgtcaaggagggaggactgcttgaggccaggagttagaaaccagcctaggcaacacagcgagaccttgtctttacaaaaatcttttaacaaattaattgagtcagtggctcatgcttatactcccaactacacaggagatcgaagtgggacgatcatttgagccctggagttcgagattacagtactccaggctgagtgacaagtaacagattgtctctataaaaataaataggtcatataagtatataatataggtcatgtacacatataaatataggtcatgtacatcagatgcccatgatcactacacaatcctaagctaccagtatagatgacattcacttcaattcaactcaatttttcttgtaacatagcaaatatcttactataatgtttctttcttcatatgttctttctcttaactccaattataatttttatgctcagtagaattgcatacttaatgcatctctttttaaggtgtgccccacagatgcctggaaaggtggaattttagaaggtctgtgaggtcaaaatcattttacaatactctaaggtgttatgtgccttcttcactgagttgccttttccattgacagtgcagaaacaatgatgggaaaaactgatggcgatttcgcaccagtcaagcaacagcaccaggcagtaggagagaaaaggtgcagtgtcacttaaaccaaacaccgcatgttctcactcataggtgggaactgaacaatgagaacacatggacacaggaaggggaacatcacactctgcgaactgttgtggggtggggggaggggggagggatagcatcgggagatatacctaatgctaaatgacgagttaatggctgcagcacaccagcatggcacatgtatacatacgtaactaacctgcacattgtgcacatgtaccctaaaaacttaaagtataataataataaagttaaattaaaaaaaaaaagaaagtccttgagggagcagggaaaatgattgttttaataaatcataacacttgaatacgtaatgtgtctctagggcttggtgaagcctgagggagctctggaggaacaaacatctatgtaattgtttgagttttgagttgagctggctgcttgcttttctactgaactcctcttaatttaaagaacgatagaccaactatcactgctaagattggagtatctctcacttatttataaaaactgaatgagtcttttacttcaaggaaaatgacaaaatttgagcccatgacaaagttaaagttttctaattttcattagtaataaaattgtaattttcatttgtaattttctaacgaaaattagaaaattttcaaaagctggtatctatcatcatgagtttgacagtttttcaatgctttcagatcctcctaatgaaatacatggtaatatcaacaaatgtatttttgtaaataatgtataggacaatgtataaatatttgaaagaactcataactcgatgaatcattattttcaaatgaccaatgtatgaggtacaaaatcatgcatatacaaaaaattaatttaggacagaagttcagccaataaattttgatgtaagaaaataaaaaatgtttattttcaaaaccccatatccaaattgcatctaaaatttaagatgacatcatttgccaatttttgttatagtatcaaataatatactcagttatttgaaaagatttttaaaatactaatttccttttcagctatatgtacaactggatttttaaaaatatttaattaaaacaatgttgtgcaacagattgaatatagaaacatatataacaatccatatattatagactaacaataattcaaagaaagctaaaatggctatgcaaatgtaagacaaatttgatttcagagtaaaaaatgttactcagggtaaagaaagtcatttcataacaaaaggtattgaagaaacaaaaatacacagcaattttaaacatttgcgtacctaattacagagcttcaaaatacatgaagcaaaaactgataaagctgcaatgagaaatagacagattcacaattttagtagatgatttagataaatctctctcaatcacagatctgacaagtgttaagaaaattagtagggatcacaaagccttgaacaacactgtcaaccaacttgatctaactgacatttatggaacacttcacccaacaacactaaaatatgtgttattttcaagtggtcatggaacatttaccaagatagagcatattcttgcccataaagcaattatcaaaacattttttaaagttcagatcctttaaagcataatctctaaccatgcagattcttagaaaatgttcagtatatggcaacaaaatagaaaactttcaaataaatcatggaacaaaaaagtaatcacaagggaaaatagaatgtaattcaagctgcaggaaaatgaaaacacagcatatcaaaattgaagagatgcagccaaagcattacttagaggaaaattgatagcagtaaatacccacatttagaaagaataaaggtcttaaatcactgatctcagcttcaactttaagagactagaaaaagaagaacaaatggagcccatagtaaacagaggaaataaattaataagaggtcagagcagaaatcaatgaaattgaagagaaactaaacaatacagaaatgtatgtaaaagtaaattgtatttttttgagaagttcaataatattgacatgttaataggcagatggaacaagtaaaatttttttaaaaatatgaatatcaagaatttgagctgtgaaattactactcatttaaaggataataaagaaagataagaataattttaagccaacaaatttgacaacttagattaaaatttataatttcttgaaagatacacactatcaaagctcactgaagtagaagtagatcatctacataagcctgtaagtagaaaagaaattcaatccgtaattaaaaacctacttgtaagaaaattccaattccaggtagcttccctggtgaattattccaaacatttagcaatgaaatattaacaattatacacaaactcttctatggtattccagagaagagaacatttttcaattaattttgagaccatttttactctgacaggaacaacaaagtctttataagaaaagtctacagcctatcataactcataaaaatacctgtaaaaaaactaaacaacattttaacaagtcaaattcaacaatccataaaaagaaaaaaacatcattacaaattaatattatttcagaatatgagtttttaacttagggaaattagttaagccctcatattcacaaaatatacaaacaaaaaatggtcatgtcaatagatgtagaaacttttgaaaaaattccaaattcatgtcagattaaaacacacacacacacacacacacacacacacacacacctcaaaaaattacaaacagaaggatacttcctcaaactgataaagggcatctatgaaaaaccaacaagcaatgtcataactataatgaaagccagaacactttccacctaagctcaggaataaaggcagagatgtctcaccatttctactcaatcttgtaaaatagtttcttaccaatacatttaaagaagaaaaagaaataaaaaaaatccgattggaaagcaaaaattaaaaatccttttatttgtagataacaaaatcacctagggagaaagttctaggaaatctatcaaaaaagctactatataactagcttgtctctgttatgtatatattcgtatacacatacacacaccatagacgatacaaataacattttacatgtgtatttaagagaaaatttaatctttcaaatcatcttcccaggtgttatggcatttgatttctattgctacaaacatagagacatataaacaacatagtgatttcccaaaaaactaggaaagtgacagattgaaattctcttctgagataagattctacagaaaccttatctatattctttccctgacgggctatacgtctgcacaacctagattctccctacaccgccccccgagccagatcaacacagccctcagacttaatgttcatcctgaatttaaacctcttcttcagaaataagtctgatctgagaatgaaatggagtaaagattggcttactcacctaggatatgattaaaacttccatgattgcccatgtgctaagaagacattggcctgaatattcacaacttccctgttaacttttaaagcttaagcatttcctctgtcatttttttaaaacatgaagtgcaatttgaagaatttgatattctcagatatgagttaatttgttttgtttttagaatacagctctgcaaaattcaccaaagaagtttctaggtttctgggatgacaggatacaagatgggcagttcctctgatacacaaagtatatatcacacatagatgagtttctttgtgccacgcacagttttagtcactgaggatgcaaagataagacactctccattctggagacgcttaagacaggtgagaaaacagatgtgtgagcacatcgtgatgatgcactgttgtcaactctgacaaaggggcacagaaggaaagggaagggaagcaggaagaagatttttcctcgacaagagggacatgaaagacatgactgttgacacaaggaaggaatacatagaatggggagcccttggaagaatgggcaattttatttcgttgctttgttttcaaaagagataaaattcctgaatgacttcaaatgactgctgttttctaatatgatactggaaaccagcatccttctgttagctgccagctggtgcatccacacaccacactcactgcattgctaataactgttcacaaccaactcttcctctggagaacttccttgagccaaaggaaggaagccatttattgacagacagcaaagtgggtacaaaaggtgaggcctgcttgtcagtacagtttgtgccccagaactcgccatggaaacagactgaagtgagtctccagtaaaaacatccttctgcttagctctttactccaattctattccacttcctctactcccctcctccagagaccacttttccaataaatcacttcaataagaaatttcatctcaagctctgcctcaaatggatttcagcgaaaacacaaacttcttaatatattagtcaagatgtgtaatagttaacctatatccattccgacactatttcttcacatctatactttgtatgcttttcatgtaaaacaatataccattttaccaacttcaatatagacacactacagttttcttatttttctattgcttttaaaacgaccgttgttactccaatttaactaaaaaacattccttctttcctctctaatagtagcagtacttttcttccatttgtagcccacttcagcagccttagctctgtgaacctttttttggatttttttcaaaaatggtgacattgtaagaaggaaaaacacatatcttgtttctctttactattttattttacagctgcttctaataattgcatccatcttgtaagatggaaaatgttacatttcttgaactcactgaaataagtgcaaaaatctaaagtaataggactattataatcactactgtattcataatgtagcaacagaaaatcagtatctagttcaccataatcctagtaaaatgatatgcattttctgaataaactttactgactgatactaacatgcatcattcctaaagttttttaatgaaataactatgaggagataattaaatattttaccttctatctttaaacattaaaagaattggaatatgacatttacatggtttggctctgtccccacgcaaatctcatctggaactgtagcatccataatctccacatgtcatgggagggaccggtgagaggcaattgaatcatggggtcagttaccctcatgctgttctcatgttagtgagtgagttctcatgagatctgatggttttttaagaggattttcctccacttcgctcattcttctccttcctgtcaccatatgaagaaggatgtgtttgcttccccttctgccatgattgtaagtttcctgagacctcctcaaccatgctgaactatgagtcaattaaacgtctttcctttataaattacccactctctggtatgcctttattagcagtgtgagaagggactaatacagaacttttaacagattataaacaaaaaacaaaatctctgaagacaaattgtgattacacacatttagagttaatgattaagaagttttatctttacctcaaaagaacaaaagagttaaatttaactgcaagctgaaataatatatgtcttaaaaataacatgcttttttccaccactattgtatctcttacctgaagtcggaacctgctcttctaccattttctggaatcccaggatctggacacatgtcagagaccaatgcaacacctccttggctcactgtaatagacagaaacattgtcaaaatgctgtatagttattgaggaaatacccagataaaaaatttattctaggcattttcagttctttaatgataatgacttaaaatgtgatctccaaaggaattaagacaccttaaatacattcaaataagtgtttatattctgattggtgaaaatcaaacatgtgttttccagtgaaaggatgataatctttggttttatttctctcatttttaagatgtcaaaatttaataaaaaatctcatttggtccttatgattacttttatgccaggtcacaattaacagcatgatcagaaaaacagcattatgagaaaaacgcatacacttagagagaagaaagtcttcacttattcccatagatgacaacagagatgatatttactaacttctatacaaaagatactttaaataacattatgtatattttaaacattgaagtgcttatcattgaactaaaacccataatggtttctttgttcaaatgcactgatttatttctcgaatttcatggaaaaacttttctcctgttgggacttgcaccatcacagaataatttctaaagaactcatttgtttattggatagagtagctctcacttcaacattcatttcatcctgtataatttgtctaatcaaactaacacatttctttttttttctcccaggaatttgcttagcagagggcttgggacccaattcagtataatgagatgtgaggggaagtccacaggagtacttctgggaaacattacaggatgctaataaagtgcatatctattttactctgaaaatttctgtgtccaggtttcaaatgtagaactattgctgccattttcctataatccaaggatggagacaacagcatgtatgcaacagaaaagatgtgtcaagaacctggacctgctaccttattgttaaggcagaaaatcaaccaatttaggagcaatgtcgcaattctgaacattctgttgtatttattatagctgatttactatagcgtaaatccaatgaatagctgattctattatttgtagctgaaaggtatacatataaatatacattttctcacaaatattttaaataattccgtgagaagaaaataatatgtctgggtatatgtggaactcgtgaagcatttgattaaaattaccataaaaacaacagtaatcatatcaagtttagcttagtttgtttgttttgagacaggatctcactctgttgcccaggtgggagtgcagtggcacaatcatggatcactgcagcctcaacctcccaggatcaagcgatactcccgtctcagcctccctaatagctggtaacacaggcttgtgccaccgtgcccagataattaaaaaaaaaatcttttctagagatggagtctcactatgtttcccagactggtctcaaactcctggctcaagtgacactcgcactgtggcctcctaaagtgttggggttacagacatgtgcaaccacacccagtcaaaatttatcttttactactaaatgagaataaatttgggtaacataatccttcattaaatacaaattctattgaatatattatgtggtttcattcttagtaagtacttcactattccaaacgggttaagatattttttaggtatttttatttcttttttaaaataagttttttttaataacatctaaacattattttgctgcatgatgtgacaattatattgaattccaaaattttattttctaaatgtttaattttctcaatattatatcaaaataatccagcaagtttggtgatagcatcagtagatagtgagacagaaagctccagacctgtatttccctatggaaacaccaaagaaatgactaccagaagattaaaataattttacaggagcgctaaatgacagtaaaaaaatctgtaacaaccaagcaaatgcccaatgaagaaaaagatgttcaaaataggactatatttcatgatgtcttactctcccttgtttcataccatgacttgcgtggcacagtgcagttgagaggaagcggcccagtgaccagtttcctctctaggtatgaagaagcagagagaaagtggctggcagcacgatggtcgctctgtgggctgcctgagagactgagctctgtctttcctgacttgcaggtcagatgaggaagggcggcataattgggatctctggctagcagccatgaaaggctgtgacaagcactgctgtatagaaaactgcagcaagattgcaaacccatgggtacactggggtaagggattccaggcagaggaatacaatagaacacatatctaaggtcccaatgagaagatgaggttagattctttggaatattaatatgtttaaaagcagctggggaaaaaaataaaaacaaaaatacagcaaaatgtacacacaaacccagacaggacatgtaccccccaaaaacgtgaaaacacctaaagtcttcagtccaggttgatctcaacgttcagaggcccactaattagtgaacattttctaccgtgttctgcaaacatggagcacggtagttaatttttttcaaatgcttatttttttttaacaaaaaccacaaggcatacaaagaaagagggaaacatggccattcaaagggtcgaaataaatctctagatacagtcactgaagaaatatatgcatcagacttgctagacaatgaatttacaacaacaattatagatatgaatttaaataaaggaatataaactttccaaatttgaggaaagacatagatgtacaaattcaaggagattaatgaacacctagtaggataaacatcaagagatccacagcaagacacataataatcaaactgttaggagccaaagaaaaagagagaatcttaaaagcagaaagagaaaagcaagtcctcataaacaagggatccataataagactatcaacaggtttctccatagacatttcacaggttagaaagcaatggataggctgggcacggtggctcacacaacgtaatatattcaatagaatttgtatttaattccaacactttgggaggctgaggtgggtggatcacttgacgtcaggaattcaagactggcctggccaacatagtgaaaccccatttctactaaaaatataaaaatcagccaggcatggtggcaggcacctgtaatcccagctacttgggaggctgagacaggagaatagcttgaacctgggaggcagatgttgcagtgagctgagactgtgcccctgcattctagcctgggcaacagagcaaggctccaactgaagaaaagaagaaaagaaaagaaaagaaaagcaatggataatatatttaattgctgaaaaaatgtcagctgaaaattctacatctaggaaaaccatccttcaaaaatgaaagggaaattaagacactcccagataatcaaaatagagtgagtttattaccaatgtatgttccctacaagaaagtccttcaagttgaaatgaaagggcactacacagtcacttgaagcctcatgaaaagaaaagggtccctagtacaggtaaatacatgaaaatatatataaaaaagtattatactaagtttgacttaaaacccccatgttcatttcctacagtatttaaagataaatgcataaaataattatgcatttacgctaatagttacattatatataaagatgtaatttacaacagcaatagcataaagtaagggagcagacttgtaaggattgaagttttcgtatatgaatgaagtaaactggtgtcaatttaagatactgccatcattgtaggatgttatatgttatctccatggaaaccataaagaaagtatctatagaatatgtaaaaaagaaaagagaagacaatcacaacgtgacactacaaaaatatcaactaaacatagaggataacagtaatgggacaaaggagggacaaaaatgctgaaagacatatgaaaattgaataacaacaaaatggtaaaagtcagagctaccctttaaataattattttaaatataaattgatttaacgccctgttttaggctgaattatgtccctcctccccgcaaagggttacaccttgaagttctaaacaccagtacctcacaattgactgtatttggagatagagactttaaagaggtaattaacttaaagtgtcatccttaaggtgagccctaatccaacatgactggtgcccttctaagaagggtaagttagcagaagaatacataaaggaaagtccatgtgaagacacaagaagagagtcatccacaagacaaggagagagcgcttagaagaaaccaaccctgcccaaaccttgatctcaggcttctaccctctagaattgtggtaaagtgaatttctgttgtttaagccactcggcgagtagcgtagcactttttttatggcagccctcgaaaatgaatcaccccaaaccaaagacataggttggcaggaggcgttgaatagtaagttaataagtaacagaatgcaactgtatgttgcccacaagagactcactttaggcgtaaggacacaaagaggttaaaaacgaagagtaatcaaagtcagagagccagaaagtagaatgatggttttgccaggggctggggcaaagggaaagagaagaaggaatataaggtgttattgtgtaaagtacttcagcggagtatgatgaaaatttacagagatgaatagtggtgatggatgtacaatagcatcaatatatttaaagccacagaaatgcatggtttttacttttcttttcttacttttttttctttttttgagacagaatcttgttctgttgcccaggctgcagtgcagtggcataatcatggctcactgcagccttcgtcttccatgctccagcaatcctcccaaatagctgcaactacaggtgcatgccaccactcccagctaatgttttattattattattattttattattattattattattttgtagaaacagggtttcaccatattgcccaggctggtctcaaactcctgggctcaaacaattctcccacctcgacgtcccaaagtgctggaattacagtaagttatcgtgtccaaccagaagtgtatgcttataatggttaaaaccagcaagcctgatgttacttctgtcttatgtctctctctctctttgtgtgtgtgtgtatgtgtgtgtgtgtgtgtgtgtgtgtgtttgaataggtctgtatttctaacattctgatactctactacttttctcttcaagcccatgttttcacagtctgcactatgtgctggggtacagttctcaatgagtaagcagtggtctactactagctctctgaaatttatcttgtaaatgcatttagctttaataatttcaaaatgtaatgcagattgttacttctgccacgtttattctttctgccatcacaggctggatgtcttctatactacctcaagcaaaatcattattgctgtggcaaattaaaacagcttcatcaagatgaacgactatcattgatgtttgtcagaaataatagactctagcttggtagttaatgcacttttccacaatacccaaactggttgaaaatacaacacaccaaggcttacaaaggcccacttgcatgtctccttttctatttttctcacaaggaatagcagttaaaagaaatggcagaaattggagctacctgcccaagttgggcaaaaacactctggatctttttaaagataatgccaaagtcacttactaaaaaaaggttacttagttggaattctgtgaaggcgcaaaatgatttagacaagcctgaatggattgcagatggtagaagataacaaaaagtgattagagattaaatgtaaaatacaggcgattttctgaaacagagggagttgtttcgtgtgataaacagtcagaaaaagtatgctgacacactgtatgtgcaaggaaatgatagctccataaatcccaactatgtattccatccacaccatgagtcattgattcatctagaaataaaagctccaaggttggaaagaatcatggagatgaaaccacttcaagaggaatccttagtacctcagagaaacattttcaaagagaggaattactgggcttaatatcactttaactctaattttgttgaattatatcttttcagatctcatagaacacatgacatagatagtaataaatatgttaaatgtaagtcaaaaccctgtagttaaaaatcaaaactgaaaatatcaatagattggttcattacacaccattaatattaaagaaagatatgtaattatgcaagtggatgatcagatataaattagacagtttgtaaaagagtttaaatgaatttgattttaaaagtataaattacatatattttcaatgactttttcaaagcatgttgatttataatacctcattagatctgcacaaaaccttgtgactctgcagggcagtaaagaaaattcttcttcatcaaattaccctgctgtttgaggacatgccatgtaagtatcaattaaaactcaacatgaatttctttgtagcaaactatagaagtagatcaggtgccatcatgaataaagcaagtgtctgaaaagaagtataagcaacgacatctatgacagagattagaaacaaatcaattagtggagataagatctatatgagtgaataatcagaattaattacaaatgaagcgctaaaaataattacaatgatacaaaattaagcttatgtgtttgctagaaactcttagtatcatttacatatgtttttaaatgtaatccttataatcaggctatgaattgttaatattaaacccattttataagaaagaaaactgaggccagagttaagaatgagctgactccagggccgggcgtgggggctcatgcctgtaatcctagcactttgggaggccaaggcaggcagatcacctgaggtgaggagttcaagactagactgaacaacatggagaaaccctgtctctactaaaaattaaaaaaattagctgggcgtgctggtgtgcatctgtaatcccagctactctggaggctgaggcaggagaatcgcttgaacccgggaggcggagtttgcagtaagctgagattgcaccactgcactccagcctgggtgacagaacaaaactccacaaaaaaacaaaacaaaacaaaaaaaaaacctttctgtactctggccataattaccttatgagacattatgcgttgaagggctttgtaaactaaagagacacttttggttaataaaaacttatttttatttcttaaaagttgccttcctttcataaaatttaattaataataaaaatacactgagcatccaaaagaaaaatgaagaggtgttttcatttatattcccaaccaaacatacacatgggaagccatatggtttcaaccacgagtctttagtccaaaccatctgttagcaaatttccttcagctaagaggaaagagaaagactttccatggagaatataatccacctttagagaacaagagccacagattggcttgaatgttaaatctctatgtaaggtgtcattttaagttaaacgttgatttatatttggaataaataaaccaatataagagccatttagataaactcacactttttagcacgaaggcacttacgattgattattattgtctattttcattgttggtacttgtttcttcaaagatgtacagatgtatttcagttggatcagttttgagacaaactgtaaccatttaagccttcagagaggtgacgtatgtttttatctgcataaccatcaggaaagtggttatacaaaacatgttctcattgaaatttttagtagcagtctccccagtgtattgatgagctttgtttgagtgacagcccactctaggatatgtgtttgagggacactctagacttcagaccttcctgctttactcagtttgaaatatgtcaacaatgacagctttttacttcagcattttgtagactcagtattatctcattgaattgaaaagtaatagctctattttaataaatttctcctctttgatttgcaggaggtttatatctcagcaagaatgaaactttgtcatgccacacccttcttcaaaaactaataacttgattagatgacaatttgaacaataagaaaatgttgccatggtaatcatttctttcttgcagccataagaggataattttgatttacagcatcctacgagacatttctacatgcataacagttttttttttattttttgctgtttttacagaatatttgtacagtctctagcagtagctgttttttctctcatagtagtaaacaaatgtttacaagttctatataaacaggtaaaataagaattgttgacacttggatgataaactcttattatcggagcaacattagaagctttaaatgaatagttcacatagaagtaagttgctcagcacatattgcttttatacgtattgttttagatctcatactaatggatctccaattggacgtgaagagcttccaaccctgagtgagagacaagggctgcattttccaagtgtttaacttattacattgccagatttttttgtctggcccctctttcctctcccactacataccttcatgtgctgacttttaaaacacaaggggttgatcacctattatcataattcatatgccccaattttacccatgttctctggtctctaactcaactgccatggtcttaaatcaagctctcttttagtttatagtaatttatttttaaaaaatacatttcagcttctaatgctatgtcctaaaatatataaatgatacactaaaaaaaataactctattgtacataaaaaataaaacgatttggcattcctaaaattcagtcattcaacattattcttactactccctacagagatcctatgatctcagtagttttgaacactgcagattcttacagtctttatttatttttaacatcgcctgccctaggttatttttctatcagagggaaaaacaagtagatttttcataagggctcagatattaacaattatctttccaactgatatatcacggtagcagtaaatgttcaaagagaaaatgttttccttataaagcttcaaattaagccaagatgtttatttactatacacataaaataaaaaataggaatattctactataaagtcagtgtaaatgaccttaacaaaattaatggcactgaacattttataagagcctggagaatcgtcctcatcaccatctgtctgattccacatggtgctctgagatgttcaccggaatgtatattggcagcaccaaagagcgacgtctctatgcctccggctggctcccgcaaatgcagagtgactgtcacctggggagagcaccggcttagctggaggacttagggcctgtcatttctgctctagtctccttctgcacatttaagaactctagacttaagactcagaaatagttttgggggctcactcaaaaatatcttacaggatgcccaattattcatggtctcctcacagtgaaagtagcatttgactaggccagtttatattactttgcatagaatctgtaattcaggccagcaacttaaaaatgtggaaagaaatgggaaaaagtcttaaagtcgttatatattttagaaacatatatagttatagttaaacataatgtatttaaatatttatgtaaaatataataattaaatcttcaagttttatttgtcattccctagatttagaaaaccatgagatatgatttgaatgatgagtccccacagaaagtttctttttgattatagttcattagtgatttcaggataagtacattccaatacagtaaatatggatgatataagtatgtattatgtaatttatggacatattttattacttttatatatattacctatgtattcagaataagagaatagtgtcattaaaactttaatactatgtatactaaatataatttatatatcaaagtaaatatatacaataaataagtgtatttacataaatacataaatataagtattaataaattaatatttaatattaaggctttattaaatattagtatattatacagttttaaatacacagttatacagtgtttagtatttgtttaccatagtacgatatataaaaggaaataagttcaagtatttcctcaggagtttaggcatttttaaagagcagaaatattaaattatctggttgagaattgctgtgatagtttaacattgtaattaacctatcaataactccatttgatgtagtcactcaaaaatttaattctcttagaatatgtgcagtgcaatttcaccctatatgctattcagatattttgcagacgcaaaattgagagaactgagtttaagattgtgataaaaaccttctgtgcagctgttcatgcccattttgaaaatacctagctgcaagacacttgggagaagtaaaatttaacacgtgatgctataatacgtgcgttaagacttcaatttcacagatcatgaattattaagttatatatatccttaaagaaatcacggcatatcacctcgagtcctgaaatcacagacattaacatgcactgagaagactatgtaggttatttaaagtcgtgctattatttttatttatataacctcacctgaatatatgagactacttttagtatgttcctcatcatagtacattacttacaggtatctgtaaatgtggaaaaggtaacaatctaatattatattctatagtgtaaactttaatgtttatagggaactatgagataataataaaacaggaagggtgatcacatatgcaatgttttatggtaagcacgtttttatgtattacataatttaagtgtcacaaaatctttaggagggaattattactttgctgaagaaatgagaaaagtgagggttggaatttcagccagcacatcttgtttatttagctgataaatatattaaggtgtctgatttcaaagcccacattgttctttgtacattaattcactgttttcacttttgacctttaggagagctttaaggagataatattcattcagataccacaagttgaaaaggaaaatgagaagtacttcacacttcgctaatatttgagcttaccttatatatctaatatgaattcctatgtaaaagattcaaaagggcaatgtaatataaagcagattaaaaaacagaacgtggtgtaattctatttttttaaataaaagaaacatagaaaaagaccggcagtgttgcaggatatactgtcttcacctttgttgacgtgtaaacccccctttggttactgaatctctaccattgtaacaacgcggttgtatttttatttttaaaatttgtgttctaataatgctctacaatgagaatagttctttctttaaagagaaaaacaatcacaaaagcccagcagaggttgcagcccatgcacacttctctggaaccatcctgcctgcccacaccggccgagggtgacctcacgccccttccttgtttaccagagcacaggcccgtagtcatggggacttggcccaaatagggcaaggcttccattaaccgtaagtcatgaatttgaattattttaaaaaatccttaaggattacttcttggagaactttagctatgatgcacacagtaatatgaagcccttagtgatgaaagccagagctggttggatgccactgggccacggcagccactgggcatcatggcaagtgcagggggaggaagagggagtgtctcagagggaggcagctcccgcagaggggagggcatgggcatcctcacaggcgccccgagaaggggcagactcacagaaagaagtgtaggcaccctgcagatcacgtcacagctcatgagagccatacggaaaagtgaccagcgcctacagccaaattattagtggcttcctagttttggcacacgtgtccgagccaagaactctcatctctctctttcttaagtggttctagtaacccaaataatctaagtttttttaaaaagattattcaaaacgaagacaggcaggaaaaaataagagaaggaataaaaagagtaggaatgagaaacaaaagaagaataaaagataaagaagggaaggaggatagagaaaagggaaagaaaaagataaaatagaattctaacctttgcttcaaggaattccaagccttggggaacagacagttatcgacacaagaggagtgagaagtcgggggaagaaggggtgtgcagaggagacacctcaggcatgacgtgagcaaagacagaaagaacccgggatgttcgcaggacgcaggggaacttgcttgtaaaggggaacagcttcaactgagaaacaagaaaatccaggtcagttactgaggcaaaggtcaaaccatgaagaccctttctgaataagatgcttaatggaaagcagagactcttacttaatattattttctttcactgatgcattcagctgacattcagatacagcgtcctccattatttatatgtgtatttagttacatatagttattgttggaaattttatatataagggctttctcccttaaaatatcaaccatacaatattattgggaaaatttaatgacatggaatacacaatacacctagcattgctcaataaagacaacgttacagcaaatatcagctcctcatctttttctcctgtaaacagtttagactaaattatttcagtgttttctttcaactttaatataccatgagtcaatctctatgattcctatactcaggattattttatcaaggaatgttataatacacaagtttataagagattacggagatagaaaagaccacatgatcggcacagaaagaataaaggtaaaacactatatgccaaaagaaacacacacctttcatttcaaaaagacagattacttgcacagtataaggaaaggctaaaagacataacttcggtccgtcagaaacacagggtttgatgtctccacaaacaaaactagttgtacaggaaatcgtgccttttcacttagaaaaaagtagattcaaaattttcttgtcacagtgtttgtttgttgcctacagtcttattgaattatatttaaaaactggcaaaaaatgttgacgtatatttgaacaggccccagagttttatttgtaaaaagaaaacatttcaaatgattacttttctacattagagatcaaaatccccatggaaataacactttaaaagagaaatagaaagttaattgtagccagttttatttagttattcaacatccagtcagtgaaatattgactgaatgcctggtacaggcaggctctccgtcagctcctgggagggagaaattaatagctagatgggggagcatcagattttggatagggtcacagttggactctgatgcaaaatgacatttaagctgaaatggaaaagatgggcaggaattacctaaggtaagagtgaatttaaaaaccctcttgcccagtaaacagcagaagccaagccctcaggaaggaacgagactggagtattcaaagatccgaaaaaagatgaattggcccaaaccactgaaacttgagaacaagaaagaagaaaaggagaaagcatgaaagatgcttagatgagaaggtccaatttatatgttaaacagttcatcgtcgctactcctacagacccaggcaaagccaattagaggaagaaggagaggaggatgttgaagtcattcagacagaagggtgaagtgttgggctggcatgctgagtgagggttgaagggcagcagacagatttcattgcgttcgagaaaaaatgtgagagaaatgtgtgagtggtttgcttccaagaattgagggaaatggagttgcctctctgaagccactgagccaacggtggtagcactcaccatggtggctaaagcaatagaagaacacatcacgatttggaaggtcaagagttccattgctgatctcagatccccacaggcaaccaagaggaaacctcagttggtctgttggttatatgcatgtgtgtctggattagagagccgagatctcttagagaaacatggtattcactttcttccaagagatgagactgaaaagcatgggaatcattgatgtgacctagaatgggactcagcaccatgttgaacccttgaaaacgcaatcatgcttctttgctcgtgccgctccttccacccaaaatactcttcagccaggtcttcctgtcacagcctgctcagcacacaggtatcagctcagatgtcatctgcaaaatggccctccctgtgcaccctggctaaaccggcaggactccttccccttctctatctacctgctttatgttgctatgtggacagcacgtaacacgatcacaaactgtatccttcgtcgactcagcacccttccaactatcatgtaggcccatggtagcagcggattttctgtctggtttattgttctcattctgagtctgcacagagactgtcacacagtaagaaagcaacacgtgaggtagtcagtgactggagtagcaaagaagccagcccgtggctgagcctggagcgttgtgaacattttgaggtcaagaataggcagataaaacaacacagaggctgaggagcaggcagataggccgggaatagcttaggggattccagataggaaaatgttccaaaatagaaaggtttgcaaacagtttgaaatgacgctaagaagccaaatcggtagaagacagggaaggatccatcggttttgcaacactgaagatcactggtgattttagccagtccagctcaggtggaataatggaagattgaagtcgtcagacggagggaagaaattttactgttcgagaaaaactctctgagaatagcatttgattaaataaagcgctctcaaaggatttatcttgaagtaaactgggatttctctgccttaggcactaacaggtcaacaagtgacttgacattcttaatttatctttaaaacgtgaattcccccctggtccaaagataacctgactttatgcagagtagactgacgaagcaaaaccccccagatcactgcctctttgtatgttaacaaatttcaacatagtagcctcaagttacacattgtacacttagaaattactgattctctaaccataggttaactcatcattcaatcagcattatttacataagaaagtaattgtttttttctcttcagattttgttattgttgcttttattaccagaataaaattgagcaaacattttctttaacattcctgctagagaaaagggatttattttaaaaaattcaaagagctatagcaaaggcagaactactttggcaataattttagaaaatgcaatcatttctagggctgggctttaaccatttgataatgcatcttaaatcaacagtgttggttggaggcattcttccatctcataggtaaagccccgttcgccttcttggaccttcagccctgacacccccccatccccacttaatcctcaatgacttattgaatcaaaattaaagactacccctgggatatgtccatgttataggagattattttttaatgagaaaaacaccaaaagtgcctacatatatctcattaacatgtcatgataaaaccttagattgtgatgggcgttgaagatgagtattggttagaacaagtgggatgtctggcttcttttttaaaaaattgcataaagatgatgattctggatttactacctaaatgtaatgctaattctcctgaaagaattcctttacatttaaaaaataattaaataactgtcaccctaatgattcatccatcagtactatttaggcacaggaatgacttcagttaaaaagatgaccacaccaatgtccttgccaagttttgctgcccttgttttgtttttggcagtctccatttgctttcctgtttcaggtgcaaagacatctgtgtctattggttccccttcagagattatgttcctggttagtgatcctgttttaagaaggaagttctctgagaatggcagacaacaaaatgaagcaaggggcttcaaaattataatgatcatttcagaagtataaattacactttaataacactttgaaaagtgggtgctctcgcacctgagagatatgtttcctcagtgagtgtcctactaactgatacttttagtgttagagtctgccctgttgactcccaacactaatttattaaatagttgctgacgtcattgttttaacatttatttctctaactttatgttaccaagaatttatagacagtaaatcattaaacatcatatatgatgaacacaccttttctcacagaactcaaataaaacataacttaaaatgtctacattggatataacataaattactctgacactgagaagtaccacataaaattatgtggaaaatgcatactcagaagtgcatcgtgtcatacataagactcagaggtgcactgtgtcaaaggtgtctttggtcctgccatattttcttgagactgacaagtttgcaaactaggcaagacttcacagtgaatggttgctactcccggcaggataatgcaaataatatctaacatatgtataatacaagtctgttcccaatttagaagtcaaatacagatgcaatggcatcagaatacaatggacaattgtattagtggtgcacgcacgtcaaaagttcatttcatttttagctacttaaattttcatcttaatttgaaaggataaattaatatttcctaatttaaaaaatgttaatgacatatttttcaatcttaagacatgaaaatagtgtatataaatctgaaaacattcaatgatccttcaattaaaaatggaaatgtcatgtaaacactgatttcccttcagcaaccccataggcattgctttataatcagatattacttctcaagtatccacttgatgcatagcttgtaaccagctatgaagtgttaaatatcaggctgtgaacatcatagacacagagaagaaacctgacgtatgtattcaaaactatttaaaatgcatagggcataaaatacataaaatatatcattccatttcaagtggattcagtatgaaacatgaagatgaatatgcatgacccttatataaaatgtctgtaaatgttttatctgggattactgtcagtgaaataaagggctgactcagcacatctgggtagggggtggtggggggagggggccgtgccctgcccgttagaagtttggttcttgacctgatgctgggaagtagcctctaaacccttggaatgtcctagcttatgagagtgtcttcgtttacctggggaccttaggccacagcagatagtctatgtgttcacgtgattaatggtgggggcctttggccacttggtccagccacatggtattggagcacccctctggtaggactgaagactaaggtcagcaatgtgggtggacagcatgcctgtgtgacactctgtgacaaactccagttaaacttctataggcaccgaggctcaggagagcttctgtggtctgcaatcctctgtgcgtggggtcacacgtcattcctgggagaattaatgctgtcggcacaactctactgggagtggacaaccgcaagtttgaacctgctgtctcccggactctgcccatgtacctcttcccttttttgcctttaaactgtctcttttcactgtcacaagccatagccatgcacataatgaccttcctgagctctgtgcagccttctatcaaattacttaactcgagagtggtactggggacacctcaaactgcacatccaacaaatgaaatgaaaggtgtgattagaactgtgctgcctactcagcctttctggattgagccatgattaaggcacacagtttgattgcttacccattagtgaatacagccatgcatcatgtgtcctgagaaatgcttccttaggcgattcttgacgttttgcaaacatcacacagtgcactgtgcacttgcccaatcctagatagtagagcctgctgggctatagggtacagccgcttgctcctaggctacaaactcacaccacatgtgactgtactgaataatgcaggcaactctaacacaatggtaagaaatttgtgtatctaaacctaactaaacattgaaaaactaaggtaaaaacactgtttaatgataaaaaaaaaaatgggatgcctatataagatacttactataaacagagcttgtgggccttgacgttgctctgggtgactcagtaagtggacggtgagtgcgtgtgaaggccaaggacatggctgtgcactgctgtagaaacactgtagccaggtgcagtggctcacgcctgtaatcccagcactttcagaatcctaggtgggtggatcatgaggtcaggtgttcaagaccagcccggccaagatggcaaaaccccatctctactaaaaatacaaaaattagccaggcaaagtggtgcacacctgtaatcccagctactcgggaggctgaggcaggagaatcacttgaacccggttgaacctgggagatggagcttgcagtgagccgagagtgcaccactacactccagcctgggcaatggagcaagactccatctcttttttttttttttttttgagacagaaactcgctctgtcacccaggctggagtgcagtggcgcgatctcagctcactgcaagctacacatcccaggttcacgccattctcctgcgtcaacctcctgagtagctgggactacaggcgccagccaccatgcctggctattttttgtattttttagtagagacggggattcactgtgttagccaggatggtctcaatctcctgacctcgtgatctgcccgcctcggcctcccgaagtgctgggattacaggtatgaacctctgcgcccagctgcttccatctcaaaaaaaaaaaaaaaaaaaaaagaaagaaagaaagaaaaaaaaaatgagacactgcacacttaggttactctacatttgtaacacaaaatattttcttcagtaataaattagctttaacttcctgtaagctgacttagtttactttttggctttataaacttctatttagcttttggctcttttgtaataacacttagcttgaaacacaaacacattgaacagctgtacaaaaatattttcagtcttaatatccttactctataagctttttctattttattatttttttgtactttttgaagttttgtgttaagaactaaggcagaaacacacacattagcctaggcctacaacacagggtcagaataatcaacatgacttcttccatctttgcatcttgtcccattggaaggtcttcaggagcagtaacaggcgtggaactgtcattttctaggacaacgatgccttcttctggaatccctcctgaaggccctgcctgaggctgttgtacaggccgggattacaggcatgcgccaccacgcctggctaatttttggatttttagtagagatgagggttctccatgttggctaggctggtctcagactcctgacctcaggtgatccgcccgcctcagcctcccacagtggtaggattacaggtgtgagccacctctcctgtccctggaagtaaaatctttaggagtctatctaagccagtcaaaccccttttacttaacctaccatctgttcctgaggaatgtacatgtaactttatgctggtcatgaaacggaatgtgaaaaacatcttttcaggaaatgttttctcccaccctacaaaacaaatcatgacgcagagatgctcttctccctagtcttgatcctgtggagaggtgaagcctggagccacgctcttgtgaccatcttgggagcagctggctcagcgaggatggcagggagtaaggcagagaggttctcctgacacttccacactttgagtttcatacgatcatatcttttctttattttttgctatatgagtttaaatgtcccttccaagactcatgttgagatatatagattttgttgccattgtgaggtaactaggtcatgagttctctgccctcatgaatgaattagtatcattattgagatgatggattgctataaatgcgaatttgtctctctctctctttctctctgcttgttgcccatctgccttccaccatggaataacgatgcagaaagaaaaccctcgccagaatcaggatcctcatgcttgaacttcccagactccaaaactatagaaaataaatttccttcctttataaattatcccgtttgtgctattctgttatagcaacacaaaattaactaggacaattgtttaacacagtttttaagctgtgtgacatattctaacttttactaggtaatttgtaatcagaataatccttacctaaaaacaggttgtctcacttgctagttgtgtatgcttgggggagtttcataaacaatctatgtctaagatcctttatctgtagaatgtggattcttatgagtttgggcaacataaagacctgaattcaaatgtctaaccaccttattaacttaaataaattaaataatgtatttgaatctattttctaacatttgataaggtaatatgacctaccatagcttcagaattgttcttctttgactataataaaatatacaaaactacctgacaagaagtatacaagaaatagtttgcttttttcctattttttaatactttagtaaaatattgactactattttgttacctagtatatactgggtgctactgttggcactattaaagtctatgattcaatccccccaacaatcatatgaaacaggatgacaactgaattacctctggcatacaggtgttaagtagggatatggtttggctgtgtccccacccaaatctcatcttgaattgtagctcccataattcccacatcttgggagggacccagtgggaagtaattgaatcttgggggccagtatttcttgtgctgttcctatggtagtgaataagtctcacaagatctgatggttttctacagagcagttcccctgcccacactctcttgattgccgccatgtaagacatgactttggttctccttcaccttctgccatgattgtgaggcctcctcagttatgtggaaccatgagtccattaaacctatttttcattataaattacgcagtctcaggtatgtccttataggagcatggcttttctaaccacacacagctatcaaatcaaggagctcagatttaaacccaagcaggttgagtcttaaacgtaagatctcctgcccctcactgatgtttccttccaatattttacttcaaacccagttcagcaagtcttggagttcagaactgggctttaaaacattggtagaaaaaattctatagataaataaataacatgtacaccataagcaatttacatagaaaatgtgtcatccatttacagtcagtttttccaaattgtctaaaacccagtgttagcttcagtgtgtcccaagaggctgtagccaggtatcagttattggtttgatgctgagagaaaggtcctagttttgcccaccgcaactgcacccctccaaaaaaaaaaacactgcctctgaaattctgaaacctggagacgtgatgataatgatgacaagattcctaaatatatttggtaattcaggagtagcagagattacagaggggatgcttgtccctgcctgcaaagtgcaatctggaaagggtcagaatgtgctacctttctcctgcccagtcatgtggaggagcaggtgaaacatgggcaagatgtacctagaaagaacggttctgtggaccagaaagtcgacacatgggcaaaaggcttgtggtcagaatacagaatgtagctgtgaactcaaaggacccacagaccaaacataccaagagagaaaccagcatgcataggtgactctgagactcctccctctctccttcctcacaccttgtctccaggaagataccctggaatataaagataaaactacaagaaaaatggggtagggaaaagtgaagaagggactccgaatagcctgatatttattttctgtctctcagcagtatgggaattcagaaattatttcaaataagagaaaggcagtgttgcattcttaactccctgaagttgtgagtgaatatttgtccccaatatccttctttcattttccacttagcattacgttcagcctactctcaacttccacaaattggaaaaatgcaaaggacttcattctagcaaaagattttcgcagctctactttaagccttgcagtaaaggccgctcaattcaagaggacagagtaagtcagaaagtaaagacacaggccttgaggtctctctgttggactagtccattgacaatgaaatttctatgaaataggttgctatttgaataatatactttattattactatttttgcttggggtgttgtttcattaagagaatcaggaaagtttggagtttaagaggaaaaagagagaatgaaagtgaatgagtgagggttcatcaaaattcccagaaatcatttcaccaacttatgctgaaaaaacatccttgataaatcagtctatgacctgaattgtctaactgagcatgaaaataaggacagagcactaaatgacagtaaaagacacagataacataataggatggatcagaagacctgacttcctgcctcaaccagaccatccagaagatatattacctagtttaaatcttaaaatcaattaatgattctaaatcccaattccctcatttgaacactgtatcaaaacataagtggaatgatgtatgtaaaccctaaggcactacgtaaacatcaacatctttgatttctcaatgatttttcttttgcatttattcactaatatatacatcttgttattcttcataatcttctaactactcatcctattttggttcagggcaatggacctaaagcaaaaatctaatcatattatttattttatcagctggaaaaatatgtgatatgttcagagaatatttgttatcttctttgtgttttgctaaccctagttaaaagccagataagaagagaaaatatttatcttgttcactattttatggctagcatctaatagtggttgggatatagtaggtgctcaataaatgtttgtcggagaaatgaattaatgcatgcattaatctaattgcataagaagcagcaacttattttaaaaattgaaggctctcccatgtagaggtccttttttccacctgtcccactttttcttgcgtaagacttcgctctgagaaaacttaatgcttgaagctggtgcagggatattgcagtcatgtggggaggcatcaatgtgctgagaattgattaaataaataaataaagatcaaataaattcactgaggtaatgagcctgttttggaacatttagtctccaggtttcatgttcacaaccaagattttatgagataattaaatatccatttgtagtttattgaaggcattgtcaaatattcaattatatcttctcaaaactatggtacattgtaaagaccagagaccatctttcctatgtcctcggactccttcctcaactctggaaatagttgctcagttttgtctaatcagttaatggaaaattgtgtaggttatctcagaaaaatgtggaagcataaactcatttttttccactggattggacaagagaaaatatattttctctgaaccactacaaaatcaaaggtggtctctgagacctcagtcgtcctgctacgtaaattagatattcctttgattgtcgctacaatgtttgataagaaaaaggagagtgtgtgtctataaaccagttgtgtagaaaccatgttgtccctgaaaaacattcattgtacaggaagtgagacattcacagcccctgtgtggggaagagacggcctcacagagggatggaaagaccagagcagggccttagtccatggaatcttacctcactacttttttttttattgttaatgatgtcagtatccaatatgtggcattaatcatggtttgccagctttgtctttatttgtgagggaaagcaaaaggcgacaaaatcgtatgttaaataagctttagaaaatataccatcattttaaatcctctattttgtgttccttttttcctttttttttttttttttttttttgtgaataatgtcctcaaaagttgtaatgattcaggactctgagaaagccttaagaaagttagactgaagttattgcagaaggtgctcagacagaccggttctctgaatctgcacatgtaacatgcaatgggtgatcacttgactggggtacattgccttttccagactttccacttggctgcttctctgtgactcatgggtccctgagcaaatccaggggagtaagtggcagtgattcccagcctcctgtgcaggtggagaacgggtgagtcactagcaatggaaccaacaatccccaagtggagcccttcatttgccaccttcgctaacgtcagactgagcagatcttagaagcagaaataaaaattgggttcttcttataacccacatcactcctactttatcagtaagtggtttttagctgaaagaacaggtaaacacttaaagtataactcggtctcttgggcaaacttcattatttcagcacacagaaagggagtgtatgaaagtcagaacatcctttcagaaatcatgatttatgcttcttatgtctcaagaggttatcacaagatttctgagagaataccagcatttatagtcacgtaggaatttcaaatacagcttttgccccaacagagggggccaggagctcagaacaggctgcaggctaaatggaaatgtttgggaccaggattctccctgctaccactcggtacccaaccactcactacctcctggttctcaaaaaaccatctgttgtgacctttgtcgatctcttccctcaaacctaccataacgtcctattattggtacagctaacttcatataaggtttcgctacataggcaatgtgtggaaactaattctgattaaggttagcaaaaaacacaagcactgagtgaatccctgacacagatggggagagagcagcaatcctaagagattagcagccccagaagctaggtttccccctcaccacatctgcaaaccttgatcacctggaacttctacttcgatggatacactgagggcaaaggatacagcagatacagcctacagccactcaaaatggaaactggaaactcacacaaatagacaaagatatgatacacaaatatataatatttatacataatatataatatatagaagatgatgtatataaaaatatgtattaaatggtgaaacccccaagaagtcacatacactcttaaggacttgactaatagtaaattcactgtgaaaaagagatcagaaagagtgaaaagaacttgctctttcccaccttggtgctgtggggagaaagaagaaatcaccgcaaagaatttataaccttaagtccactttcccatgagtttataacctaaatttatgatacctatatggctctaaagacctctaaaattcaagagatattcccaagtagtgacccaagcaaacacaaatcctctctggagaaaaactgcctttatccaggtcttcaagtgtctccaaagataaagttccaaggaacagaagtttgcataaaggatgaaaagcaattcacaaaccaaacgagaaaacctggcatcgtgagtggaagtaggcaggttaacggacggtcgatggagagatttcacaactgggcttataggaaagaggatacaaaagaagtatatttaacatatatctattagtaaaagaaagactagaaaacacgagtatggaacaagaaggcaataaacgcatttcatgcagagtatgtatatgaatccagtagaacccccagagatgaaattatacatccatatttgtgtatgtgtatatctatatatagattatacatatatatagattatacatacacacacatatatatataatgtaactttctgaagataaaaccactaatagttaaaataaaaaaatacaaattaggaaattcaggacacagaattaataaattaaaaaaaatagatgtaagaaatttttcaaaatgcagcacagaggaggaaaaaatcctgtgcatgtgagtgtcgacggcacgggagagggagagagacaggcatgcagcttgtcaggatttcaaaagacaatttaacagtcagggaaaaaccatgtgtaaagatattataagtgagagccacatccaggaagctcagggaaaaccaatcaggataatgaaaatggtgaccatattgtggtgaaacagcagaacaaagacaaagagaagattccaaaagtagccaaagagaactggatggaaaggagggacgggcaaagaaagaggtgaaaaaaaatgagagaaaaagcagaatcactgaagaaatggggtttacaagctgatgacagacctccagagtccctgagtgccttatcagaaatgcctcctctgggccggacgccgtggctcacgcctgtaatcctagcactttgggaggccgaggtaggcggatcacaaggtcaggagatcgaaaccatcctggctaacacagtgaaatccagtctctactaaaaatacaaaaattggccgggcgtggtggcgggcgcctgtagtcccaactacccgggcggctgaggcaggagaatggcgtgaacccgggaggtggagcttgcagtgagccgagatcgcgccactgcaccccagcctgggcgacagcgtgagactccgtctcaaaaaaaaaaaaaaaaaaaaaaggaaatgcctcctctgccttttccagctacttaatcacctcctagagtcattgttcacccaccagtaatacagagaaggggaggaatcaaaccacagggttaagttaattaagctacctattatgttaattagcttaatgaattagttaatacacttgatttgatttgctatctgggcaagagatgaacaaaacctaaagggatttgtgtatttagttggatgaaatgtggtagataggacaattctaacagaagagaacacggtgaattcatcgctgttgtttcaaaaacaactggaaacaaacatttgaaacacaaggaatcaaagcttccaacttttatctttaagaaagtgctccagggcagcccttctacaccagaaacatcaccatcacctgggaagttgttatcaatgcaaattttcaaaatgttaggcccccaatgtagacttactgaatcagaaactctaggggcggggctcagaaatctatttcaataaactccccaggtcgttgaggtgacactaacagttgagaaccattgctgttagagaatttaaacaacaacactgcctgtgatcaattttgctgaaagcataggtcttagaggcaaatggccttgtgtcatgtctggctctaaaatcagcaggtgcgagtgagaccctggagaagccctggaagcctcgcatttacagtttcctcaccttaaaataggcacggtagaaagaaaagagagcaactctatgtgctccttggacatcaaggcttttgctctgattagcaaaaagaagatggggaagatgatgaaagagggtgagaaagctaaaaatggaaaggtaggagattgaatctgaaggattgcagagctgtgaaaggaatgaacgggataagagatggctgtgccagacccctattaccttcagtaaagagggcagcaggttcaagtggctgaagaagagacccagagccagtgaatgagttacagggtttatttgtggggcctgtcaggggggtgcagtgccagcagacagaattgcagaatcacaatcgcttgtagaaagcgtgcagtttatacagcatttccacttaacatcctccctccaggaaccccgatgtggtaaccttcgtttcctaagagattgctgttgggtgcatctgccatgcagtgattagacaaaacactggtagaattgcccacattttccctggaaattccagggttacggatcactaaggctttaaatgaaaaaaaaaaaaaaaaaaaaaaaaagtcaattgttctttcaaactcgcatttcttcctttctgtcctctactcctcatctgcctcatgaagatccagcagccttcttaccatcttgaattgcacaacttctgtcctgaagcctgctaaggccatgttcaaagccaaatcaggatgagtaacataagatcaaatcaccatttcactcccttacttcactgagtcctgggccatgcaagaaaccaatgcacagtccaaagaagacctctctagaccaaccatgcagtaagtgttcatacacttgtctcaggaagccataacacaatgaacacaaatgtgttctcccagcagctgcaattaaaaccttctgagcaaagacctatcctaattgagaaaaatgctgtgattagccagattggggttgaagctcggcttcgggtgtctgggtaccttctggtctcagaggaaggggaaagacagcaaaccttaaagcagacatttactaactgaaaatgggacagtggaagaaatggggaaggggaaggaaggggaggatgtgtggtcagaggtgaagctgcaggagagatcatgggaagtgtcagtcttctgcaagggatcatgggaagagtcagccttctgcaagggatcatgggaagagtcggccttctgcatttgtagaaatcacagggagccactgctacagcagagactacggcattgcctttgaaagaactttacttggctctgcaaggaacatggaagctgctggcatctggaggcaaaagttaggttattataagaaaaggtgagaaaaacagaaaacataccaaaacaaagctgtctattcaaatgacactgggctacaagaagaatcactccattgtttaaataatgtttttatatacatagggcaaattacatatgaatactataattttctaaatgtttcccctttaactcttgaatattctattatcaacagtatcataaaataattaaatttagaaaaaaactagctataattgtatttatcgcaatttctgttatagcattaacaaaaactagaaatattctaaattcccaaccaaaaaaaaaaagattaagtgaattgtggcagagttacaaaatagaaaactcttcagccgagaaaaccttttgaagaatgcttattaacactgaaaaattcacaatatataaaatgaaaaaggtgaacaaaaatagtgatacattattttatcatatttgaataaaaattacagcacatgtacatagaaaaagaaacgtgatatgctgagatgttaactgtaatttttctcagttgtaaaagtatgaaatatactaaatatactaaaatatagaagatattaaaacattgaatatttttatatgtattttccaacttttttctatgcatgcattgctttgtaataagaaattaccatacaatctactttaactcaaaattaagaaccttgtttgtaaataagggaaaatcgcacctattataataatcatttccttctgaaatgtaaataaaaatctggcggtgtcatctgtagcattccaagggaaaggaccatttcacaatgcatgagcttgtttcccctgattctcagtaggaccgcccaaagtagcagtcagggaaccactaaaaatgagtaactttcttggttcctgccaaagccgtgctcagagggccaagacttgcattgtttcacacctcattagccctccttctaaacagcgctttcgacctggctccggtgcctcctctgaggctggaaagaacgttttcatggataaccaccaggggcatccgtccttcctcattgttccagccctgtcttgcttcccctgcctcctcccacccgctggctgcttgcctctctggctgaatttgggtcacacgagcctgttcctctagttttgatgagtaggcttaggtagggcagatacaaaaaaaatttaaaacctcaacaatgatgcatcatcctctctataactattcccaaattcaagggccagatacgcatttttgaaacatctcagcagctctttcctgccacttctggtgcttcttgcgtgtcagctcaggttttcttttgtgaagtggagagtccagcccttgtcatggcaatgaaaatcccaggaaggaataaatcataggaatgtaagcttgtaggggtggatggtcctccggtgcaactcaagttcaagaggcacatgtgaaaacctgcactctttaaaaatatctatgctgtgaaacttcagcaagggatgagtaacaactcagataaaaggagaccagggtggcagaaccacccaatgtcatgtgtgagcctgggttgtatccttggccaggagagaggtaaatatggcagagagagaaatatcacgtaaagtgaaatacagcatagaaagaaatataaagagaaatagaacacaaagagaaaaacagcataaagagaaatacagtacatagagaaatacagcatagagaaaaatacagcataaaaagaaatatagcacagagagaagtatatcagagaaatatagcataaagagaaatatagtatagagacaaatacagcataaagagaaatacggcataaagaaaaacacagcatgttggaaccactggcaacatttgaaatgtggtatgctgccatgtgattaaagcattcaaacaaattttgtgaatttgaaagttttagtacagttattgtaagacattgattttctttggagaaaacaaacgttaaagtattgattggagggagacacagagagtgagacagagagaaagagtgagagaaagagagagagatattgaaaagtaaatatggcaaatgtataatgttggtgaatctgagaaggcactttgtaccttttctaactattcttgtaactgttctgtgtaagtttggaattacttcaaaacaaattactctgtttgttttgtttgtaagagacatgtgccacttcataaagcagtgatgcttgctgtaaacagcaggatttttcgaggaggcagaacagattcttatttcttgtgcagctaatcaatgaaccagatctacctgcatggttggagatggaggacagatggatggatgtgttctagctgcaggaaggaggtgtctcctaaaaacagaacctaccactttactatggccccagattaagttagatacttctctaccatatcttaaaaatgtacatatgtgtatattactcttctcaccatatactagagacatgattttacttttactttgctattccccaaattattttcctcttttctctagagtaatatatttcaaatctgccctacaaattgccttgctgaaataatagttgttgctatattgaacaatattttggtcatgacagagaaattttcaaattaagactttgtgagactgacatgctgcctgctgcactaatgatgcaactcaaattgagattttaatactggagtacctacattttcagggacaagatggctctaacacagtggagtgactgctgagattttggacctgttgaaaagttgttgtacgatttactttttctttgatttcagagcacagaaaattgttttggaactttgttttgattttagaacagatttaatgactttcccaagaacgagtttctctagagcataacaggacaaactgaccttactttgaaacatacggctataccaaatcctataaaaatggtctaaaaagtgcctgatcatttacagaagttacatggctcatgtctgtgcacctgagacataaagtaagcagtatgcattgtatttaaaacctatctttacgcggcacccctctcagaacatgacatttctctttactgtcttatgttatgttgttaccaagtgtgactcagttcagcagtttctggtagctagtgttttctatttaaatgaccaagtgtaacaacagctatttttttttctttaacagaacccgtaatgtacccagccctgtgcatggtgtttgagattctctttgcgtccagcttttaaggtatgtactgtccaaggtcacagagttcatcaatggaagaacaagatttaaagcccagggttttttctggtctttctctagcactctgtcttactcagtgattcagtagcaatactgtaccattcagtttacaatgcaacctttatttagtctgtgaaaacaacttttcggcaatggcaggtttgtactgataccataagtcttccgatattttccctgctttatatattcttctgtaacataaaaccaacctggaacttaatattactatgtgagaaccaagaaaaaaacatgaaactcttacaaatctacctgcattaaattgactgttagaagaaatctaaatgtccgcttttacactgatattaaaattcatctgtattagttcgttttcacactgctataaataactgcctgagactgggtaatttatcaagaggctgaattgactcacagttcatcatggctggggaggcctcaggaaatttacaatcatggtggaaagcaaaggggaagcaaggcaccttcttcacaaggtggcaggaaggagaagtgctgtgcaaagtggggagagcctcttataaaaccagtagatcttatgagaacttactcaccatcatgagaacagcacggagaaaccacccccatgattccattacctccacctggtctctgccttgacacatgaggattatcgggattataattcaagatgagatttgagtggggacacaaagcctaaccataacatcatccataatattaaaatcactaatactaaattgtggtcttattacaatgtaagtataagtggtcagattttgcaataccttgctagatgttttctcaatgtttaacctatgtacacatttttttgaatactatctagcccagagctttgtgcatggtatatgtaacttaaaattacatattcttatttttaaaaaacaatcttaaatgctaggagaggttaaaaaaatgataaatgaggctgggcctggtggctcatgcctggaatcccagcactttgggaagccaaggcgggcagaccacttgaggtcaagagtttgagactagcctggacaacatggtgaaaccttgtctctactaaaaatacaaaacttagccaggcatggtggtgggtgtctgtaatcccagctattggggaggctgaggtaggagaattgcttgaacccagaaggcagatttgcaatgacctgagattgcttcattgcactccagcctgggtgacagagcaagactctttctcagaaaaaaaaaagaaaagtaaagaaaaaagaaaatgaatgattgagtttcaagttgagttaggaagatgagtatacctttacttacatgtgttaccatgctttaattagggaaaattatgacatggcaaaaagtcatacatacaaataaatactatgaataggaaaactcatcgaagaactcatcatgctctaggactaaattaagcttagctggtgggaccaggggctactgagccttcattctctactcaggctcctttccttgaatctgttatgttattacagattgtatactgctagttattctgagtacatatgatgcttgccatgaatgtactgagctcccggctgtggatatttaagagaacactaccatcacgctatgagaactgttcgaagtggtaaattatcaatgctggcttctcaaagaaagggcatcaacgactcaattcgatgacttcttcagcatttctaatgcaaaaatgtgatttttttctaaagagtttccaccccttttttcctttctcatgggttcaaacactggttataccatctccaatcctgacatctcccctgtatgtaactatgactatgtaacatctcttctggaatatcgaacgtcttctcagacttctggtctctccgactccgatcttgcaagcctgcttcgcccactatatttccctatagtaaacacctttatcttttagttccttagaccaaaaaccttgaagtcagccttgactcttttcatcatacagcttacccaccagaatatcccatgagctccatattcaagattcgtgcatacaatggccgtttatcaccatctgtcagtatcttgtcttgattacagcagtagctttcttgccggtctttgtactttcccctggtctctgttccctagaatgtattctcaacacagctcacatgatcctttaaacacctaagacagatcgtatcacccctttggttgaaacacctcaaaggattccatttcaccttgagtaaaagcccaaatccttacattgattcataaaaccagacaagatctagtccccacccccacacacttcacataggtcttctgtctcctcttcattcacaatatggaagccatggcccttcatggagtacctcgaacttgctgagcacgtaatgcctcagggtctgtgcacgttctgacttccctttctagaacactcttcctccacttatctgcatagctggcctcggtttctccaggtgtctcctccaatgtcatggtattaatgaggtcttggctggccaccacatctagaacactagaatagcccctgcccccctgcactcattgtccttctcatccactctattttacctcagagcacttagcagcaatagcgtgcttactatcactgtacttaacaccatcagagcgcttaccaccatcacagtgcttaccagcaacagcgtgcttactatcatcactatacttactaccaacagagcgcctaccaccatcagagcacccaccaccatcgcacttaccaccatcagagcacccaccaccatcagagcacccaccatcgcacttaccaccatgagcacacttaccaccatcagaatgcttactaccatcagagtgcttaccatcatcagagcacctaccaccatcagtgggcctaccaccatcagagcgccatcaccaccagagcgcctaccaacatcattacacataccatcagtgcgcttaccaccatcagagcacttactaccatcacagcacccaccaccatcgcacttacccccatcagagcgcttaccaccatcagagcacctaccaccatcagcacgcttaccatcagagcgcttaccaccatcagagcgcttaccaccatcagagcgcttaccaccatcagaacacctaccaccttcagcgggcctaccaccatcagagcgccatcaccaccagagcgcctaccaacgtcattgcacttaccaccatcagtgcgcttaccaccatcagcttaccactgtcagcatgcttaaccaccatcggagtgctcaccaccatcagcgtgcttaccaccatcagcatgcttaccaccatcagagcgcttagcaccatcacaaatacgttgacttgtttgtttctgtctccttcccaaacacaatggatgcattagctcattctcttgctgctaataaagacatacctgagactgggtattttataaaggaagcggattaatggactcacatttcagcatggctggggaggcctcacaatcttggcagaatgcaaaggagaagcaaaggcatgtcgtacacggtgacaggcaaaagagctcgcgcaagggagctcccatttatggaaccatcagatctcgtgagacttattcactaccataggaacagtatgggggaaactgcccatgtgattcaattatctccaagtgaccccgcccctaacaagtggggattattacagttcaaggtgagatttggctgggaaaacagcccaaacatatacctggaatataaagtcctgggggcaagactttgttttgctcactaccgtattggcagaacctagaacagagggtgcacacagtcagcactcaatacatatttaatgaatgaataaacgaatgaataaatgaacaccactaaagactgaaagccccttattttctcctgactgctttcaagtataattagcattgtctgcactattaatgccactcaaattatactagaagccaataaaagacacaaatgttttctatcagaaaacagcactcagtaaagactcattcatcaacgtcatgcttccagcctccatgcatatgctttattaattgaaagccctataaattcaaattttttcaagttgcatatatttttaaatatataaatatacaaatatatttaaaattgtaattatttccaaacttttcttattttttacattgtctcatataaatatcaaatagataagttagggatggctggaaaaaaattaaagaaaactaaagttatgggggttcttttgttgttgttgttgttttgagattcacttttgttgtccgggctgtactgcagaggcatgatctcggctcattgcaacctccgcctcctggattcaaacgattgtcctgcctcagcctccccagtagctgggattataggtgcccaacaccacacccggctatttttcatatttttaatagagatagggtttcaccatgttggccaagctggtctcgaactcctgacctcaagtaatcagcgcacctcagcctcccaaagtgctgggatttcaggtgtgagccaccctgcctggccagttatggggattctaaatcattcctcctttaggccacgaagcctgataagggccagctttttacagcccaagtcctggcacttgtggaagcctcctttgaggaatgaggactctagtgaaggaccggccacatcgcatggctgttacacagtgggtccccaaaatgacatatccctaactcgtgacacaagtttaatgaccaatacatatttgatagatttaaatatatatatttatcttcatttacattcccagaaatgactgtcttaatcctgacagcatcagtattaaaaatcagcacttgctcttgtgtctgaaactgacaagtttcatttcacccatgacagcctactgttgtcacatagaaaatgtgatttgaacttggatcattgatgtgaaaagcaaatgtcactgcttggaggggccaactgtataacatccaattaggcagaaatcactgtaataacgtctcttttctgttagagtagagggtgttgtcaggaaacagtgtaaccacccctcatcttcacaggacaccctgtgtgcacacacacatcactgaagacatcattctcagcagtgttttaatatttaccttcagtttgactgaattgtatgtaaaccttggttttcagggacttatttaaaatgacattcttagccaaaatttaagtacaatagaaatacaaagatttataaaattatgtaataattcatactagagtttgaaaagtttgatgtcacattgaaatcagttagttttagactgcgtataaatagcagagatgtaaagtaccctttggtgtagtccacatgcctgtgcacatagggaaaagataatggtacaggaagagggtacacaggagcttttaaaaatcaagaggagagatacctaaatccacactgttaggagaacttacaaataagaaattgtcatgattatacggagagtttaggagaagaaaaaattgtctacatactcaaagacctcccatatctttttcaaagcagggcagcctttgatttgctaggtgtgagagctccatttgtgatatgctaagtaagactggctgagattcgggtcagagccagcacagggacacattgggcatctctgcaggtgatgaagtgctccagggcttgagctgaacggggtaggactgggtgctcccactgggtctaccagctgcctcagggctaccatggcgcccaggatccatagaacacatcacctgctctacccacacccggacctgccagctctgcaacagactgggagacaggagctgggctccacacagttgagccagggagcatctcatctggcacttcctgctttttggagcctgatgcatctcaaactgaaaatgccaggtgtgaagaaagggagacagcaataacgctcaaatttttaaatttaattaaaatatatcagttaaagagggaaataatttaaagaatgttttttaaccaatttattttcattcaaaatatgaaaatacacattaattttccaagctttagctatagagctaaatctcttgcttttgactttgttccacagggaacacagattattttttggtcaaaaccaacttttaatgatcatctaaaacgtcaaggttttggttactacaaaacaaggcaagaatttaagacccatgaacatgaaggctatctttgtgcatgatccttcaatttcttaaaaataattcccacattgtttactgtcatcttccctacagcgaatttggcagtgattttcatttttcactattactctagtcacagtaactcttttaagataacatttaattagtttatagcatatttcattactctacataattataatgacaaacaatagtatcagaaataggtttggcataaacacagccagctcaggaccactgcacagtgcacctgctgggaaacccaactgtgtaaggtaccaagagagaacccccactgatgaatgcccgtcccaccaggcccctcaggcagggctgcaagccagctgagcctacaagatgactcaatggaggttgcgttttttttttttttttttttttaatcttccactgctgtatatccacccattctaaatgatttataattcagcacaaacatgctcattgggaaattagctacggctgtaggaggcaggaaaggtagagtctaatagcaagaaagaaagtcttccaatattttcaggactgatgcaaagactagttgacggaaaacctgtcagacttcatctttggaaagaatagaacatgcaagaccttaatccttgtgatgccaggaatgaagagcaggactggagccctccagagactctgattcctgtcccacctggctcagaacccctttcactgaaagggttggtgaaataagttttattctgcaaagatggacatctctctgggggaaataacatgagatatatttcaaataatgcccagcacccctgctacacacagatgctaccagaagatcatggggtgcgcagtgaactcattggggcgaaagcctctttaggaagggctgtatgtacagctcaagtgagaatgtttcctaccagagctattcagaagccgctgttagacataaccatgtgagggacccaggtaaacaggaaggaaaggagaaagtcaaacgtgagtttactcaacacagaaatactctctcagaagcttagggcgaaaggtatagcactactttcctagaaaagctttccagcgcggctgtttatttgatagatgacacctgctttctctttttttttcctctcagtgcatcacctatacacagcatttcttatctttgtgagagtgaaaagatggtgtttggtggacagaaatctgcatctgaagcattcattatgcaatagtgcagtcctcagtcttctaatccgcaaaataatgggtagatgctcaaatgagaacatgagatgggagaggagttttcttacgaagccctttactctcctttcttccttgctggtgcagctgtctttctattacaaaggctttaggccaggcgtggtggctcacgcctgtaatcccagcactttgggaggctgaggcaggcagatcacaaggtcagcagtccgagaccagcctggctaacatggcgaaaccccatctctactaaaaatccaaaaattaggcagatgtggtgggcatccctgtagtcccagctattcaggaggctgaggcagatgaatagcttgtccctgggtggcagaggtggcagtgagccaagatcacaccactgcactccagcctgggcaacagagcaagactctgtctaaaaaaaaaaaaagcctttaaaaatcagagactcactttgcaagccaatcagtgaattttaggacatggggatgtgacccactcatggccaatgagacatacaggaaagtgtctgccagggcatttttgggataaacttttcttctggagagagtccactaccgagttgctgcactggacattgtcattggagaatatggcatcatctgtccctagcatttggctacaaaaaaaagtaaatttacatcctacaggaagatgctgcaggatctatgtttacatcatttcattatgccttggggtataatcaacatacaaaagcagcagcatttctatatgccaacagtgaacaatctgaaaagaaaaaccagtcccatttacaatagctacaaataaaataagatacctaagaatatacctcaccaagaagtaaaagatctctgcaatgaaactataaaactgtatggtatcaaaggtctcaggcagcaggtgcaaactaagaaaatgacttggaaccaacccaaatgcccatcaatgatagactggataaagaaaatgtgtcacatatacacgatggaatactatgcagccataaaaaagggtgagttcatgtcctttgcagggacatggatgatgctggaaaccatcattctcagcaaactaactcaagaacaaaaaaccaaacactgcatattctcactcataagtgggtgttgaacaatgagaacacatggacacaaggaagggaacatcacacaccagggcctgtcagtgggtagggggctaggggaggggtagcattaggagaaatacctaatgtagatgatgggttgatgggcacagcaaaccaccatggcacgtgtataactatgtaacaaacatgcacattctgcacatgtaccccagaacttgaagtataataataataaaagagaaactataaacaaaaatcctcttgaaacttaccctggagcttctgtgcaaatttttctttttcctttttctgatggggagggaccttacatcattgttgattaatggtaaatacatcaaatatattctataaagagaagtttgggatttggagaaggaaaactggatttctcgtcttgaaatactcagagcataacagcgtcagcccagaggcattcagcactgattatcacaatgctagcaacattattatcatcaaataaaaaaccaactcaaaaacttcagcagcttatctctctcagaatgtaactccagaagatacaattttctatgtaaactgtattcaaatatgactctcaatgtaaaataaaagataaatacatggaataggcatgggagtgaaatgtatttttttcttatcaatgattgtatttgtgtataaacaatggatttagcatatagatttacttaaatcactactcaactttaaatacatctttgtaataagaattactctttttatttgtaaatcatcccaatcttaaaagtaaatgttagtaatgttttgttttaatgagcaagcacatatatctataatatatatattgtgtatatatatatatatttaatttaaagctttccttggtcgggcttggtgtctcatgcctgtaatcccagcactttgggaggccaaggcaggtggatgacttgaggtcaggagtttgagaccagcttggccaacatgacaaaaccccatctctactaaaaatacaaaaatcagttgggcgtggtggtgcgtgcctgtaatcccagctactcaggaggctgaggcaggggaaacacttgaacgcaggaggctaaggttgcagtgagccaagatcgtgccactgaacttcagcctgggtgacaaagagagactccacctcaaaaaataaaaataaaaataaagtcttccaacaattttgtttgaattatggttaataacattgaaggttttctcctaattccaggggatgtttcgaatgccttctgttttgccatttcaattaataattccattcttgacctaccaaataatgcatatttaaaatataactttcatatgctaggaatgacctaatatttgtagtgtgttcttctaaaatacttctaggtcctcagagcagtgtcatttaattaacacggcgccattgcatctacttgaaattagttctaatttccgaaatggtaatctaattatttcagaacaatttacatagatagcacataaatccttaaaataaaatgtaacttgttgcagattcatggaatcatttctacgaagcaaaattgtattctacggcaaggcaagggaagcccagggaggtgaaattgtgtatatttattcctatgagaacatgataacaaagactaccaaattgcagagatgatcaccttcttgacaaattgtgtagttattgttacaaagaaacaaattttcattttgcacttgccaatctagtttactacccactgatgaaatttttcacttagacacaggtaacgggtctcagtgtttagaatcattgtataattatctgagacactacttagttttcaaatctccgaaacacagaagcagatgcgtttcacttagccaaggtcaaactgttattctctttgccagctgtcctgggatgatcctagttctttttttcggggggttatcatattagcaaaaatgattcaactgtgaattggtccctttgggatttcccactagaggagaagggtagtggtgatgtggcaaagcagataacaagaaaatactgctgtttctgttaacaatatgggctttccaaacaagctcaaatcagttctacactccataatattaattcccccaacacccctatgaaaaatactggtaaagatcttgaattcccaatacgcaatagaactgggaagtaaaaccattcggcataaaatgacattcccaaatagactatacaatttcaacttctttagagaaataatgccatataaatctaaactatgaagatgaaatttccaagaaagagcatatcttcattgtgtaatctaaaagaattgcaataatttcaaacttttaagaagaaatccaactcacacactgctcgttctgaacaatacgtatctaatcgccaagcttcattctgtactgtccctgtgttcagcaacacgctatgaagtataaaatagaaataaggtaccatcgtgatgtatgtggctgacattttatagtttgcaaaatactttcaactacattatttcatttgtaatgagaggctattatactgcagtggtttagagtgtgggtttgggagcccgcaattatctacatttgaagcctctgctatttactgtctgtgggatcttgtatacattctttgcctatgtttttccatgaccttatctgtgaagcgggatggtaactgtgtccaccttacaggattattgacaggactgaaagtattagcgatcttcccagggaccagcacagaaaaagtaatccacgtatgttggcatttcttattgttgtttgatcatccaagcaaacacaggagtaagaatttatatgtaaactagggctcagatcaagtggcttttttttttttttttttttttttttttttttttttttttttttttttttttttttttgaaaaaaaacaaggccctgcagtccaggcaagagtgcagtggtgcaatctcagctcactgcaccctccacctcccaggttcaagcgattctcctacctcagcctcctgagtagctgggattacagggtccctccaccacacctggctaatttttatatttttagtagagacagggtttcaccatgttggtcagggtgatgtcaaactcctgacctcaaatgatccacacacctcggcctctcaaagtgctggaatcacaggcgtgagccaccccgcccgactgactttttcttaactcatgaggattagatcagatttggaattcaattgttcagactctatgacagattttttgtatacacagctgctcccaattcatagaagtttcttgagttcctgcacacacaagactgacaggtgtgaagcagaggtgagggattggcagaggtgagcgccagcacccagcgtcaactgctatttggtatgcggatgcttcctgccaccgctaagccttgaaatgctcagagaaggagaaaacaaatgctaggatacagccgggttccatctgttaaagcaaactaaatatagcctgaggagaactccgtactttcgtatatgactccttgtggatgaattgcaactaactgaacaggcagacaagattgagaacctaatttacgagtatgcatctgtaacaagagctcagccttggccagtcccagcagccatacttcaaccatttataccctgctgagcgttcaaactgtgctcaaacaaggcaaatgccaacctgcaaccaatccagctgtttctccacctcactgcagatttctgtatgttacttccctttttttgtgtataaatcttcttccaccacgtggctgtgctgaggctctctgaatctgctgtgattctaggggttgcctgacttgcgaaatgttcattgctcaattaaactgatttttttttcttttttgagactgagtcccactttatcacccaggctgcagtgcggtggcacaatctcggctcacggaaacctccacctcccgggttcaagtgattctcccgcctcagcctcccaagtagttggcattacaggtatccaccatctcgcccagctaatttttgtatttttagtagagacgggatttcaccatgttggtcaggctagtctcgaactcctgacctcaagtgattcacccgccctggcttcccaaagtgctggggtgacaggcctgagccaccatgaccggcaaactcctttaaatttaattcagatgaagtttttatcacaccaaacaagccaccctttagatcggtgttgaaggacgacacataggatttgtacaggaagatggaagaagacagcaaatttatagcaaagaggagtaagattgagggaagagagaaaatgagaacgggacacccagaggctgcgggagagaggagctacgcagaccttgatggaagaagcgggggatttttactcgaagtcgtagaaaacatgaaaggcaactgctcagtagttgtgtagaaacagagaaggagcatgcttaaagggacattagtggaacaccaggatgttttatcttcacaaaagatttaggctatagagatagctcaccaaggaaaaggtgtaaacatacaaaactacccttgaattaacagtgggtttaggaaaacacagtatgttcaactatgctcaatcccagatgggagcatttttattttctttctcattgtcactagtgagtaaaatgaactataaatgttgtaaacagttaaatggtttcttaaaatctctctctccccactcctcctctcctttccatctctccctaacttaaatatatgaatgtcaagactccatgccacattttctttatccagtctattattgatgggcatttgggttggttccaagtcttggttattgtaaatagtgctgcaataaacatatgtgtgcatgtgtctttatagtagaatgacttaaaatccttttggctatatacccagtaatgggatcgctaggtcaaatggtgtttctggttctacatccttgaagaatctccacactgtcttccagaatggttgaatacaccattttttatgcagccatgaagaacaatcagttcatgtcctttgcagggacatggatgaagctggaagccatcattctcagcaaactgacacaggaacagaaaaccaaaccccgcatgttctcactcataagtggggttgaacaatgagaacacatggacacagggaggggaacatcacacaccagggcctgtcggtgggtagggggaaagaggggggagagcattaggacaaatatgtaatgcatgagaggcttaaaacctagatgatgggttgataggtgcagcaaaccaccatggcacatgtgttcctatgtaacaaacctgcaggttctgcacaagtatcccagaacttaaagtaaaataaataaataaataaagactccatgccatttgtctggcagtgggaataaaggaaaatgcagatgtcagcaaaatcagagccccacagaactgcccgcaatgaagacctgaagcagtgggggcctcaggagaggccgacaaagaaaaggttaggaagaaaggctggtgcattttcatttccagcacagagaaagcgtgaacaacaaagatatttttaaacaaagagttgaagaggccgttctccatgaaagtgagagagtgctgatactactgacagacaggggtgggatgtgggcagtagaatatatttttcagaggtaggcatggtgcgttctgtttggaacatggcaagtttgactttataaaggggcacttctgtaaatttccctgactgcttttaagacatgtggacaggaaggactcaagagaactgagagattcagacatcgatttgatagccatagggactgtgaaaggaaaatgaacctcagggccccaaaatcactgagctacagggaaaagtcaagctggaaactgcttacggccaacctgcctccaactctattcaaagccacccctctgctcactgagataaacccatatctgattgcctcctttggaaagactaatcagaaactcaaaagaatgcaatcatttgcctcttttctacctatgaactggaaaccccttctctgcttccagccgttctgcccgcctttgctttgagttgtcctgcctttctggaccgaaccaacgttcacctcacatatgctgattgatgtctcatgtctccctaaaatgtgtaaagccaaactatactctgaccaccgggggcacgtgttatcaggatcttctgaggttgtgtcacaggcgcaacctcaaccttggataaataaactttctaaattaactgagtcatgtttcagatatttggggttcacagaaccaaggctttgttcaaacattactaaatcttattgtaaatcttcagccattggatggcttgagttaaagttcttaatcttaaattttgttattattattaaactttaagttctagggtacatgtgcacaatgtgcacgtttgttacatatgtacacatgtgccatgttggtttgctgcacccattgactcgtcatttaacattaggtatttcccctaatactatccctaccctagacccccaccccactacaggcccctgtgtgtgatgttcccccactctgtgttcaagtgttctcattgttcaattcccacctatgagagagaacatgcggtgtttggttttctgtccttgcaactgtttgctcagaatgatgttttccagcttcatcttaaaattaaaatattggacttcatacaatgaagctttttctgctcctggttcacttcaataacctgaatcagttctcttccaaaaccatgttattctgggcaaaatggaaattgctcagaaagcataggcagctcaatgttaatcatgcatagaatatgtaaaatatcctccaggattgtatgctgatggtgggtcaagagcgtgagtgtttcctcatgagagaaaagcaaagagactgaggagttttcctctgccttgtattattctgtctgtctccccaccatttcaaaggctccgccaagatcaggagcatcttttctcattgcttttgcatcaagaagctgaaaagagctggcccatcatcttatcgggatgttgaataaaaatatctaatgaagatgtccaggttaacattgaaaataaagagtacatcctgacactggtaaaactgtacacaaagctatcaagagagtcaacattaaaatagctaaaagtttagcagtaaagccagacatcataaacaattcagacagaatttcaacgtcacaaattccaaaaaatacatcacaatttctcagggtttcattttgtctctgtgcgtcaaagatttcaatacattctttaaaagtgactttcctattttatatgtatatttgatatatattattaatgtaaaataacataattatacataaactaccaatttctctgatgtttccatgacattcaagaaacatccataacctaagaggttaacaatgcttataataagaaagtttcaggtgattaggaattttgtatcatgagcattgaccaatgagataaaattactggaacaatattaggtatttgcatcttttactgatatattgttttgctaaataaaatataatttgtcagccaggcacagtggctcacatctgtaattcctgtaatcccagcactttaggaggctgaggtgggcggatggcctgaggtcaggagttcgagaccagcctggcccatacggcaacaccccatctctactaaaatacaaaaattagccaggtgtggtggcatgcaccagtaataccagctactccggaggctgaggcacaagaattgcttgaacccgggagacggaggttgcagtgagccaagatcacgccactgcactccagcctgggcgacagagcgagactccatctcaaagatatatatatttgtcaggaaaataattagtatcttgattccttactatcccacttaatattaaccaagtaattgactcagtagggttctaaataatccctgagagaaatattgaaaaattccacttaatgggacaaacagaaagataaaactcaggaaatgtgaaaccatcgctacatatcttatctcaaatgaattaaagtcattaaaatataggaaggtgtttatccaaggcagtagcttgaagctgaggctatttcttagagcacccctaggaatctcttgaatgatcaacccaaggcttaggctcctgcatttatgacctcagtgttggtttgcttttttgttgttgttttgtttttttgagatggagtcgcactctgtcacccaggctggagtgcagtggagtggcctcagctcactgcaacctccacctgccagattcaagtgattttcctgccttagcctcctcctgcctcagcctccacggagtaggtgggattacaggtgcccaacaccacacctggctaatttttgtatctgtagtagagacagtgtttcaccatgttggccaggctggtcttgaacttctgacctcaagtgatctacatgccctggcctccccaaatgctgggattacaggcatgagccaccacgcttggcttgatgctttgtttttctcattgttttccccaccacactggtgagactttccatttctattcctcacaggtcttatcttttctttagtctatagattgtgagaaccgatgtgaagaatatgcttcaaaagcaacttaaatgatataaacgcctgtccgtttaaaatgacatattcagtagagttcaagtaattgattaaaaatttgaaaatatctgattttaatgtatacttgctaaaataattaagacagaaatactgaatcacgattgatccttgctgttaacatgcacagggccaggatctacacatcatctattctttcaacaagccttttttgaaagctgcctgatatggtttggctgtgtccccacccaaatctcatcttgaattgtagctcccataactcccatgtgttgtgagagggacccagagggagataattgaatcatgggggcagtttcccccatactgttctcatggtagtgaataagtctcatgcaatctgatgtctttataaggggaaacccctttggcttggctctcattctgtcttctatgcctccatgtaagatgtgcctttagccttccatcatgattgtgaggcctcctcagccatgtggaactgtgagtccattaaatctctttttctttacaaattactcagtctcagataggtctttatcagcagcatgaaaatgaactattacacctgctatggtgcacatgatttaccaggtgtaagagatagagaaataaaagcattgcagtctaattgtaagagctcgaattttagcagaaagataactatggcacaaccctgaaggcgccaagctagaagtatgctcagatcctttcattccttcattctctaaatgattattgagtgcttggtacaagcaaggcaatcttgtaggcattagggatacaccagtttgggagtgaggtaaaggggggctgttcttatggagctcacattctaatgataagacaaatgtgcaaacatttataaacatttacacattatataatcatagtccctacattatattaatatatattaataggttttatgatatgtcagattataagggttatgtgaaaaataaggaaagataaaaagagagtgaaggggtggcaggtgtccccttgtgtaggatgtcatggagatgacatttgagaaaggtctcggaggagtgaaaattgaggtgtgtggagatcttggggaagagattttggatagcagccattggcaaggccttggggcactacagccctggcaaacaatgcagggccagggtggctggagccaactaggggatgggagctgttgggatgaggtcaggaaggacgtgaggactaggctgagaaagtccttggagacaacataaacacctgagatgattttgtgagtgacagaggagtcctcctccttatttgggttgctctggaaacccaggccttggggtgaagagcagttgtccacgcatggtgatgactgaattgagctgttagaggattagtagttactcattagagaaagtaaacaagagttctgaaaagcaaccttcagggagcaagtgtcttgcggaaaatcatggaaacagaagacccagggcaaattcatgaacagcaggcatcctggagtgtctgtatgtttaatcgtgaaatagcagtgagtagaagcagccaaggccagatcatcaaagactctgtatgttgcggagacaccactggtgccaattcacccacccatttcctccctgcgtctttctaacagagccccaatcccgatcaatatgagtgtctgtgcgcctcagagcaagctggcttctcccccagtccccatcccaaggatgagccttgctcagtctcaatcaggtgcagtcattctacccctgggctagaaggcaatggggagagagcgttgaacacaatttggacagataacgaatctacaggggtgtgcagaggggctgacctctgagatatgtttcccagctaataagggaacatagtaaaactgacatccgtccaccactgctggatctcattctgggtgatgagttcagcctgcgaagatggccctgtgtaaaggaagatatgaagtgagaggattaggaaggaggggcatgtcccacacaggccctgggctgtgcatgacggatggagtccccagacccaaattctgttttaaatatgtatttttaagataactcaggtagctacagtgtaagctgaagagatgagggtttattcaggtggagagatgatagagtttgggggatattacaaggagaacggagagagtttgtctgactgggcattgtacaccttggtcctattccttaccacaggtaatatgcaaaggggatcaagcctggtccttactacagaaaatatgcaaaagagacgaagccctggggagaagagacgatcctgaacagagtgtgcaatatagaagctcagtctgaggtgtccagagatcaaccaggagtcgaagtctagacacagagatggatgagttgggagctcaggaggggccaacgctagggaagacccatactgaacatcctgtatctactctagttttggctcattttgttgccttagacaatttgctgttaagtaaagttatagaatgaacacaattatagaattatattgctctggtggctatcagccttaatgcgggtggcaaagcaacgcctacatcccctcagccatagctctttgagaggcgtgacagaaacaggaaagatggggagaaatcattgagcaaccaggttagcctgtgctttcactggaaatctttcattaaacagacgttatacctttagagtttaccttaacctgtcttcaaaactaaggaacgaccccactagaaatatgattgtggaagccattaacgtacagaaaaattagttaattatccctcaagggcagaatggttaaaacaaggaaagcacgtacaaatgagcataaagttatgttttaattgaaaggctaggagcataaattcaaagacactaaataaggtagcacactgcatcaatctgagtgaaaatgtctcatctgtgttttctcatctgtcattttgtcattgtgttgcctgtttgtgtgagcaattatttccttctcaggcccatgcttcagagcctgccttgggcgggagggtccaaggccttgagcttcttgggctggccagtctaggggttcgtgtttacactgtagtgagggactccactgatggtcctgttcattcattcattcaacatcagtaattagatatcctctactaaatattgagaatacaagtcccaagttaatgaatcttgaatggagaaacctcaggttttcagaaggaggggaatgtagcctgaatgagactcttccggacagaaaatcacgacagggaagacaagctgggtattcgcccgctgggtacatcatttattaactcaacagatgttagctcagcacctattctgtgtgaggcgttatgctaggaactgggtacaaagaggaaggccaggaggacaggggccctgacctggctaagcctgaggctacacacactcatcagagccctcagggatccacgtgcagccctaacagccaattcagagaacaggacacagtgggtgatgtcagccatgaacaggaggggcccaggtgatgatcaagcacctccttccttcttctttcttaacatttgaggaaatgaagatgtttgagactttaaataacacacccaaggatataatttataccttattattttaagctatcaggtgcaattgcatacatttctaaataagttatgtaaaaggcagtgaaatgttcctagggtctcacaatttgtgatggttaatactgagtgtcaacttgattggattaaaggatgcaaagtgttgatcctgggtgtgtctctgagggtgatgccaaaggagattaatatttgagtcaatggatcagggaaggcagacttacacttaatctgggtgggtaccctctaatcagctgccagagaatacaaagcaggcggaaaaatatgaaaaggtcagactggcctagcctcccagcctacatccttctcctgtgccggatgcttcctgccctccagcatcagactccaagttcttctgttttgggactcgggctggctctccttgctcctcagtttgcagatggcctattgtcggaccttgtgaacatgtgagttaaaacctaataaactcccctttatatatatataaatatcccatatatatgtatcccatatatatatatcccgtatatatatcccatatatatatatatatcctatatacatatatcccatatacatatatcccatatatatatgcgatatatatatatgggatatatatggggatatatatattgcacatatatatggggatatatatatgggatatttatatatgaaggatatatacatgggatatatgtacatggttatatatgtatgggatatatgtatatgggatatatatgtatatgggatatacatgtatgggatgtatgtatatgggatatatatgtatgggatatataagtatacgggatatacatgtatatgggatatatatgtatatgggatatatgtataggggatatatatgtatatgggatatatatgtatgggatatatatgtatatgggatatatatgtatgtgatatatatgtatatgggatatatatgtatatgggatatatatgtatgggtatatgtgtatgggatatatgtatatgggatatatatgtatatgggatatatatgtatgggatatatatgtatatgggatatatgcatatgggatatatatgtatataggatatatatgtatatgggatatatacatataagggatatatatgtatgggatatatatgtatatgggatatatatgtatgggatatatgtatatgggatatatatgtatatgagatatatatgtatatggtatatataggtatatgggatctatgtataggggatgtatgtatatgggatatatatgtgtgggatatatatatgtatatatatatatatgatgtgcctggacacatcacaggcacctgataaatgctaacattagttatgtggaaattattacatgctgtattgtatttaatttcataaattgcctgaaaacttttatatctcagaagcatatagatcttaaatacatcctaacagtactatatatatagtcacatataatcatatatataatcatacacatataatcatatatatactcatatatatgatcatatatatatatatatgatcatatatatgatcatatatatatatatatgatcatatatatgatcatatatatatatatatatatatatatatatatatgattagttctatctctttagataaccctgactaatataccatctatttaggcttcacaagcctctgccttgctttaaggtgctgtgagctccttgggagcctcttcatcttattcgtgttgcatgcccagcaccggcaggctgcctgggacacaaaacaggccccttgctcaggtgctgttaaattggaaagagcagccctgggcttggagcctagaacttcagttcttgagcaatgacttgaaagcaggcccactcacctgtcaccacctctatcactgggagatggggcacccaccctcatttcctctgtcctgtgtcgttagcctgctggtcatttttgaaagaaagttttcgaccacacatttttagtttcgatatgttgcaatacttaaacaaaaataattgagaacacaaaagacagtaggttttatttaaatgaagaagcaaattaacaaagtcaacatcttatcttactttcaaagtgtatcattctaaaaggttgatgcagcgttcaaggttaggtgctgtctacttcctcttgcaaacttgttttctagtgtgaaatctctttatggtcagggatcttataagtttgatgaaattgactgagtatggcctgatttgttatttgctcataagattttttaaaacttacacattatattaaaccaaagagtcttaaccataaattaagaaatagtctgagaatcctaaggttctcccaatggcttctgaccttcccctttttcagttgtagtgtgtgtcggcatttagaacccactcttgcattctcaaccacagctcagaaaacataaacagtccagggtgtgctggtatcagagtgtgggagctgactttcaaatgttcaaaacacgtgtaggtctgctgctatttcagttttaaatatttagattatataaactttacaagaaatcaattatattaaaacagaggtaataatggtttaaagctcatggattcccaataatgtgtttacatttggccattgtctactcttgaaggtatttactttttcatccggtcagagtatgacatggtgcagtgtcactgggcatctgttcccaaggctgtctccagtgatgggcatggtggtggtttgaaattggccatggtggatgtatttaaaccaggcaaatggaagaaggctgcatatcaggctcttctcctgggagaaccctttgctaaacattttccagcagcacattaccatgggcaatagacttggagacgcagcttctactcctccttcaggtttttcaatccatgaaaatccatggtttttctatcttaaaaagccttttccaagctcttcaccccaaggagaatcaataacttatctcgttattcctatgccttattgtaagtacttgtgttgtaacacataccatgctttccttgtttaaggttcatttcatctctagaaagtgagcatttagcggtatgattgatatactgtaaatgttcaataaatgcttactgagttaataataaatgaatcaattaatacagagtaggaagatattaaaggaaactctgatgctatgtcattaatgggacacagaatctgaaattattcaaccacatatgcccctgtgcatgaaccacaataaacatttccaaattcgtttctattgaacacatgctctttgtcctctttttctcaaatccgtatcctctacaagcctgcttaacaggtaaactgaaaattcagcaagtactgaacaaaagaattgcaatttcatgattcagtattggaaaattagcaagaatatggagatgaaagtatttgaagacgtagcatcaactccccttggtctctgggtacaatgtggccctgacttatgacaagcaagaatgtgtttaacaacctactcaactgtgatgttcataaacattttacaggagaaagtgtttgcatcttcaatatttcacaaagagcctaccctctcagtatgcacatacttgattcagagctaattttaacttgaataactcagcctgtttgacctaacgggtgcgggcaacttatatataaagcatttacggtgtgagctatttttaacttacacccaatcagctggcttgctgcatgatatgagcactgcattttagtccacgaaactattggagctattccctcaagcatgaaagcatgaaggtgcaaacctacactgtgggcactggagtgcaacacgccatcattaggaactctctggagggccaggcatggtggctcacccctgtaatcctagcactttgggaggccaaggcaggcagaatgcttgagctcagcagtttcagacgagcctgggcaacatggcacaatcatgtctctaatccaaatacaaaaattagccaggcatggtggcacatgcctgtggtcccagccactgtgggagaataacttgagcctgggaggcagaggttgcaatgagccatgataatgtcattgcactccagcttgagtgacagagtgagactccctctcaaaagacaaaaaaaatctccctagaaactgtccatttgtcaatgttgagcaacattcataatgaagacttcgagaaaatacaagaccctgagttgtctctagaattatcaaaagcagattgtattatggttgacttcattttgttagttgactgtaacccatgttgctttattgcaaattaataaatcacccaaaataccacattctttgaacttaccatgtaaaatatcctataatctgaagattaacaaattatcatcacgagctaagtagaagccataatttcctaagcatttctcattcaaatcaagaatatttaaatagaaaataccaccatggctattatcattattattataaacaaaaaatgatcactactcttaaaagtattggacagtataccgtgaatcattagataatttaacaatattattaattaaatgcttactatgtatcatgtactacattaagctactgcaaaatatattataactccagattctagatattaatatccttattttacagataataaaactgagtcaaaaaggacttgatttttctagccatataaccagcagaggcagagaatgagatgagagccccagtcttgctgattccaagtccctgcccttcatcccaacttcactcttcaaaaaatgaaaggtaactatagttttcaaagaggtgaaaccaattccaaatgaggctgcactgaagttatcagggcactttgcagtaaagactatcctttaaatttgaaaaaggatggacaacgtaagacttgtttatatcctggaagataatgaacttatgcaacacgtcaccccctaagcctctgtaggccaaaaacataaacaggcacaaaaaggggttaacatcagtctccctggaaggtttttaatgcccagtgatgcagggatttaggtggatgtattaatatccaccttttggaaacctgacgaataccgtcgaccataaaacgccatcttgaagagatgcagtggcctcccctcaccactttcccatcatggctcaagtgccactttctccacatgtctttccccactagtggctccttttctcctcacagaaggcctgaccacacctgttctccttgcagcacctgttggtcttcattgacctggctggcatgtgcgtgccattcccctgctcctggagggttggcagcactatgcacatcctcacgtctccactgtctaacatgtcattgctatccatgtagcctccatagtaaggcctcagcaatgtgggcttggatatgctatcttgttttgtttgctaatgaacaaaggaagtcttctggatggaaagaccaaaaatccaagagaaggtgattgcaatggactgaatatttgtgtcccaccaaaattcatatgttgaagccccaatctccaatgagatggtgtttggaagtgatgctttcaggaagtgatttggtttacatgcagacacgagggttgataccccatgatgagattagcacccttataaggaaaggaggaaaccagggtgttctctgccactcaaggacacaattagaagatgccatctgcaaaccaggaaacgggtccttgcaagactctgaatctataagcaccttgatcttggacttccagtctcaaaactgtgagaaatatatgtctgttgtttaagctgcccagtctatgatattttgttatagcagccagagttgactaagctggtggcatttccaccttatgcaaattttctagactaacgctacttctcatgattctgtcttgctgaagttctctctcagcactgtcccatcattggagagtaatgtacctgagtattattttctcagcccaggcctgccatcttcccagtcagagactctgtaatagtttactggtttggccttagtatcttatcatttatgacaaatataggcataggaagtcatcatttgattagcacctgtatctcttaattaaatatatgcatgtgtgtttataaatgcttgttataagatactattatacctagaataggtaaattgtttattttcttctgctcaattttatagtcttctcctcgtttgtccatactgcattatgtgttgaagtaaatactaaccttggggtcagacatgtacagttttgatccctggccctaagtatttaccaactctgtggccctggggcaagttcctaagctgtattcttttctgaagagcaggtggaggtgggtggccgcccgccaggcaggattgttgtcaaaactagatgaaaacttatataccaagcaccatgctggacacgccacaggcacccgataaatgctaacattagttatgtagaaattattacatgttatattgtatttaatttcataaattgcctgaaaaattttatatctcagaagcatatagatcttaaatatatccgaatggtacacatgttctcccttaccattaaaatcatatacacggatatatggaaacttttcctaagaaggttgccgtgagcttgtgtgttgtgggaccacgcacacacatgtgggtagagtatatgaatcaagttccatatcttaaagatgactgtccatttctatcaaactcagtgtgatcattgaaatacgtatataataaacatagcaaacacttggaaccaacccaaatgcccatcaatgatagactggataaagaaaatgtggcacatacacaccatggaataaaggatgagttcatttcctttgcagggacatggatgaagctggaaaccatcattctcagcaaattaacacaagaacagaaaaccaaacaccacatgttcacactcataagtgggagttaaacaatgacaacacaaggacacagggaggggaacatcatggaccggggcctgttgcggggttgggggcaaggggagggagagcattagaacaaatacctaatgcatacggggcttaaaaactagacattgggtagataggtgcaacaaaaaccatgacacatgtagttctatgtaacaagcctgcacattctgcacatgtaacccagaacttaaagtaaaataaaaataaaagaaacacgtatataagacttatagaaatacacacaaggaaaacaccgcttaaaagtccaagattaatagcatgcatcgaaaatttctctcccaggaaagttatggttccaactaatgattgatgtaacaaaatgacttaataaccatctataccttttaaaagtaattcttgaataaataagcagttatttgcctcccacacaagaaaacatacccagttcaaggccaatgcatgggaaacaaacctgatcccacagtacaggttgtcaggaaagtcctgggtgaatgcacagatctgagcaccacagaagacatcaggagacacagggaatgcccaggtgtccccagggtggctgggctcagcgagaggcacccagaagggtttggagatgtcttagattcacgaaagcctaagattggccctctgagtttagaacctctcttttaagcaaaacctccagctattgacatgaaaagatatctatcctttagggctctttggccagagctgggtaaattcccctgttttgttctggaagtctgtcttttggaaaaaagccctaaactttgtaaaacggaaatgaaaacttctatccagagtatatgtgcaattttttaaaaccagtagatgacataaaactgcatatttcaataacattctttaactctaaacccccttgctgaagccatttcagccctttttttccatcatgaaacacctcccactaatagagctgtttgtattagacaaaataagacaggaatgcacttgaggagcagaaacactgacttggtgcagggactcacagcctccatctggggtgtctgcctatcttcaaagcgttctgtcaatatttaaagacagtgggagggtggttcaaagatggctgaataggaacagctccagtctacagctcccagagtgagcgacgcagaagacaggtgatttctgcatttccagctgaggaatgcagctcctcaccagcaacagaacaaagctggacggagaatgactttgatgagctgagagaagaaggtttcagatgatcaaacttctccgagctaaaggaggaagttcgaacccatcgcaaagaagttaaaaactttgaaaaatgattagacgaatggctaactagaataaccaatgcagagaagtctttaaaggacctgatggagctgaaaaccatggcacgggaactacgtgatgaatgcacaagtttgaacagccgattcgatcaactggaagaaagggtatcagtgactgaagatcaaatgaatgaaatgaagtaagaagagaagtttagagaaaaaggaataaaaagaaatgaacaaagcctccaagaaatatgggactatgtgaaaagaccaaatctatgtctgattggtgtacctgagagtgacggggagaatggaaacaagttggaaaacactctgcaggacattatcaaggaaaacttccccaacctagcaaggcaggccaacatgcaaattcaggaaacacagaggacgccacaaagatactcctcgagaagagcaactccaagacacataattgtcagattcaccaaagctgaaatgaaggaaaaaatgttaagtgcagccagagagaaaggtcgggttacccacaaagggaagcccatcagactaacagctgatctctcagcagaaagtctacaagccagaaaagactgggggccaatattcaacattcttaaagaaaacaattttcaacccagaatttcatatccagccaaattaagcttcataagtgaagaaataaaatacttcacagacaagcaaatgctgagagattttgccaccaccagacctcccctaaaagacctcctgaagaagcactaaacatggaaaggaacaactggtactagccactgcaaaaacatgccaaattgtaaagaccatcgaggctaggaagaaaactgtatcaactaatgagcacaataaccagctaacatcataatgacaggatcaaattcacacataacaatattaaccttaaatgcaaatgggctaaatgctccaattacaagacgcagactggcaaattggataaagagtcaagacccatcagtgtgttgtattcaggaaacccatctcatgtgcagagacacacataggctcaaaataaagggatggaggaagatctaccaagcaaatggaaaacaaaaaaaggcaggggttgcaatcctagtctctgataaaagggactttaaaccaacaaagatcaaaagagacaaagaaagccattacgtaatggtaaagggatcaattcaacaagaagagctaactatcctaaatatatattcacccaatacaggagcacccagattcataaagcaagtccttagagacctacagagagacttagactcccacacaataataatgggagtctttaacaccccactgtcaacatcagacagatcaacaagacagcaagttaacaaggatatccaggaattgaactgagctctgcaccaagcagacctaatagacatctacctaactctccaccccaaatcaacagaatatacattcttctcagcatcacaccacacttatttcaaaattgaccacatagttggaagtaaagctctcctcagcaaatgtaaaagaagcgaaattataacaaactgtatctcagaccacagtgcaatcaaacaagaactcaggattaagaaactcactcaaaaccacacaactacttggaaactgaacaacttgctcctgaatgactactgggtacataacgaaatgaaggcagaaataaagatgttctttgaaaccaacgagaacaaagacacaacatgccagaatctctgggacacatttaaagcagtgtgtagaggaaaatttataacactaaatgcccacaagagaaagcaggaaagacctataatcgacaccataacatcacaattgaaacaactagagaagcaagagcaaacacattcaaaaactagcagaaggcaagaaacaactcagatcagagcagaaatgaaggagatggagatacaaaaaaacccttcaaaaaatcgatgaatccaggagctggttttttgaaaagatcaacaaaattgatagaccactagcaagactaataaagaagaaaagagagaagaatcaaatagacgcaataaaaaatgacaaagggtatatcaccactgatcccacagaaatacaaactaccatcagagaatactattaacacctctacgcaaatgaactagaaaatctacaagaaacagagaaattccttgacacatacaccctcccaagactaaaccaggaagaagttgaatctctgaatagaccaataacaggctctgaaattgaggtaataattaatagcttaccaaccaaaaaaagtccaggaccagatggattcacagccgatttctatcagacgtacaaagaggagcaggtaccattccttctgaaactattccaatcaatagaaaaaagagggactcctccctaactcatttcatgaggccaacatcatcctgataccaaagccgggcagagacacaaccaaaaaagagaattttagaccaatatccctgatgaacattgatgcaaaaattctcaataaaatactggcaaaccgaactcagcagcacatcaaaaagcttatccaccatgatcaagtgggcttcatccctgggatgcaaggctggttcaatatacgcaaatcagtaaacgtaatccagcatataaacagaaccaatgacaaaaaccacatgattatctcaacagatgcagaaaaagcctttgacaaaattcaacagcccttcatgctaaaaactctcaataaattaggtattgatgggacgtatctcaaactaataagagctatttaagacaaacccacagccaatatcatactgaatgggcaaaaactggaagcattccctttgaaaactggcacaagacagggatgccctctttcaccactcctattcaacatagtgttggaagttctggccagggcaattaggcaggagaaggaaataaaggatattcaattaggaaaagaggaagtcaaatcgtccctctttgcagatgacatgattgtatatttagaaaaccccatcatctcagcacaaaatctccttaagctgataagcaacttcagcaaagtctcaggatacaaaatcaatgtgcaaaaatcacaagcattcttatacaccaataacagacaaacagagagccaaatcatgagtgaactcccattgacaattgtttcaaagagaataaaatacctaggaatccagcttacaagggatgtgaaggacctcttcaaggagaattacaaaccactgctcaatgaaataaaagaggatacaaacaaatggaagaacattccatgcttatggataggaagagtaaatatcgtcaaaatggccatactgcccaaggtaatttatagattcaatgccatccccatcaagctaccaatgactttcttcacagaattggaaaaaaactactttaaagttcatgtggaaccaaaaaagagcccgcattgccaagtcaatcctaagccaaaagaacaaagctggaggcatcacactacctgactttaaactatactacaaggctacagtaacccaaacagcatggtactggtaccaaaacagagatatagaccaatggaacagaacagagccctcagaaataataccacacatctacgactatctgatctttgacaaatctgacaaaaacaagaaatggggaaaggattccctattcaacaaatggtgctgggaaaactggctagccatatgtagaaaggtgaaactggatcccttccttacaccttatacaaaaattaattcaagatggattaaagacttaaatgttagacctaaaatcgtaaaaaccctagaagaaaacctaggcaatactattcaggacataggcatgggcaaggacttcatgtctaaaacaccaaaagcaatggcaacaaaagccaaaattgacaaatgggatctaattaaactaaagagcttctgcacagcacaagaaactaccatcagagtgaacaggcaacctaaaaaatgggataaaatttttgcaatctactcatctgacaaagggctaatatccagaatttacaaagaacccaaacaaatttacaagaaaaaaacaagcaaccgcatcaacaagtgggtgaaggacatgaacagacacttctcaaaagatgacctttatgcagccaacagacacatgaaaaaatgctcatcatcaccggccatcagagaaatgcaaatcacaaccacaatgagataccatctcacaacagttggaatggcgatcattaaaaagtcaggaaacaacaggtgctggagaggatgtggagaaataggaacactttgacactgttggtgggactgtaaactagttcaaccattgtggaagacagtgtggtgattcctcagggatctagaattagaaataccatttgatccagccatcccattactgggtatatacccaaaagattaaaaatcatgctgttataaagacacatgcacacgtatgtttattgcggcactattcacaatagcaaagacttggatccaacctaaatgtccaacaatgacagatgggattaagaaaatgtggcacatatacaccatggaatactatgtagccataaaaaatgaagagttcatgtcatttgtagaaacatggatgaagctggaaaccatcattctcagcaaactatctatcgcaaggaccaaaaaccaaacactgcatgttgtcactcatacgtgggaactgaacaatgagaacacatggacacaggaaggggaacatcacacaccagggactgttgtggggtgggggtagagggaagggatagcattaggagatatacctaatgctaaatgacaagctaatgggtgcagcacaccaacatggcacatgtatacatatgtaacaaacctgcacgttgtgcacttgtaccctagaagtataataagaaatatacatataaatatataaaattaaaaaataaaataataaaaaataaataaaaaaataaagacagtgacccctgtgaatagcctgtggacccagaatatggatggatcagtcaaggcaaagttctttcattgtgttctcttatttattcttttatacaaccacgagtgagctgtttattctgggcactgcatccttatcactaaagtaattacaggcaatggtttgaaactatctgcctaaagggaattcagaattagaatcctccatttctggaggggtgttcataggtacctgtcagccctcctctcacttggagggggaggtatttctgcactgtgccaaaaaatcatttgaaaccaaaagaaaaatgaaatatgtttaaagcacttttttgaatatcattcttctgccaggtcttccgctgaaaacatgtgcatactcttttaatttaatacctataattatcctgtgaggttgtcatctcttttccacactagacagaaagaggctcaagctcctacaactagtaggttcaactcaaacccaggtctccagacctaaaatgttatgttcttccagttaaaccacatctgctttgtgttaacttgataaaaccaatgtttgcgtaatcattctaagatgtaaagaatattcatgaatgttaagctcgcagtttgcttatttttatttgatgtttattgatttcaaaaaatgactgttagaccactaagttttagcaaatttaggacaatgcacaccttttgcttcatgtgattgagaagtatgaagtaactcattagaacacattcaaattaatggactaacaccaaagagacagtctttctattttaatgtagtgatagttactctaaacatgaaaaaagcaactttaaatgtatagatattatatattatataatatataatttatataatatataatgcctatatgttataatttatataatatatatttacatgttacatgtaatatatataacatgtaattatatataatatataacataatatataatatataatttatatattatataaaatatatagctatatgttatatattatatataatatataaattatatattatataaaatatatagctatatgttatatattatataaaacatacaagcatgttgtatattacataatatataaaatgtataacatataagtacatatatacaaaatatatttttttcatctgcatgactcatagtacttaacaattttatttagatataggttttgggatttttctttgcttgctaattatgaacatatattttatcttttttactggccatctagaaacaaatggcactgtctttctatatcatcattgttgaacccagttgcagatactgatacagtcttttttttttttttttttttagacggagtctcgctctctcgcccaggctggagtgcagtggcgctatctccgctcactgctagctccgcctcgcaggttcacgccattctcctgcctcagcctccagaggagtagctgggacctgatacagttttaaaatagagtcagagcttgacggcagcctaattttagtcaccctcattctccttgctatagatcatattccaaactagtatttccatcacgactcttattacattcagaattcttacatactttattgcagttctaaattctcttctgaaatttgtaatgatgccgggaagcacttggccaaagtggacaattaaactgcctttggaataacctgtggtaggaaagtcaatacgggaatcaatatttttggactgaagtgagctccacttagaaggatcagcatcatccaagcccagtttttgaaataaaaataagagatgtcttcattataaaacgatttactgggttcattatagaaaatgcatggctggatttttaaagtgttttgatgtcatcatttcagtcacatttaaattgatggataaaatcaaatccaaagttgcaaaattgaagccactgcccttgttttacaccaaaaatagtgactataaaataaagttgcctcagggctaattgtacccattacgttgagtttaatgactcggcagtctagttgtctttccccctgtaaaaattttttgaatcttcattacacatcatcaaactgttacctaaacaccaggggtcctgtctgggtcctgctgctcactgcacagaatgccaatgactgagatcacgattactgccaaggaagaaggctttaatcggatgctgcagccgaaggagatgggagctcagactcaaatccacctccctgacctactaaaattaggggtttatataacaggaagaaaaatgtaacaacgggttacaaaacaggagtgaagcatctggcatctcattgcctggatatggtgatctggtgagtttcatttctttgagactgtttttagaggcctgggggtgcttttctgaggaaggaagtcaaagaaaatcaatgcaatttcaagccttaagatcagaagggtcaatttctttctttttttttataacatgttttattgctttatttttaatttctatgggtacattgaagttatatacatttataaagtacatgagatgttttgacacaggcatgcgacgtaaaataatcacatcatggagaatggggtatccatcccatcaaacatttattgttcgtgttacaaacaatccaatacactcttttagttatttttaaaagtacaattattttttactatattcaccctttcccattttgctaccaaataaaatatattattctttctttctttctgtattttgtacccattaaccaaccaatgctccttgcccccacccctcactattcttatcagcctctgataaccatcagaagggtcagttttctatgtttatcaaaaagaaaaaaaaactgtctatgggactattaggtaggtttcaaaattcttatttgaaattaagcttgggcttgtttctgtgaagttagagtgtgggtcacccccttgagttactgacttcgtggataatcagagcgcttggaatacaagctaggaaaggcagtgtcaagagacgtgtcattgacagctaacactgtgactttcaggaagcgccttcacttctctacgcttgtcttcacttttctaggatagggaggtgccgccacactgacgatgagagttgcatcctgcgtgacttctctatttgctggtggatgggttaagaatatgccaccccaccatatgctgctctggcatgtttaaattaaagacgcttaaaaaaaagccagttacaagatcatgtcattctgttcattgaaagcaggagatagaattcccatacgaaatatactgtcttgataccaaaagggaagcagtgttcttatcatcaagcacagaaaactgaagcccagggatatctatacaaacaaaccttgctacactaacacttatccacctggtcacttctctagccgatcccttaccctcgcccaagtcccttggccttgccacgtttcacaagcaaatattctttgtccaagccagtctatcagtggctggttgtaactgtttctttggatcttcatttccttatgagggctcccaggccacatgaaatttgcattaaataaacctgcatgcttttctcctgttaatctttcttatgtcgatttcattcttgggccgtaagaggacagagtagagctttgtctcccctacactggggggtgtcttttccatatccacatagaagaagcttgttcaaacgtatcaggacattcaggagagatgtgactggtcaagtaggggtggatggcagatgtaaaaaaattatgaggatgtgacagtattggatatcaaataccaaatgtatgtccaataaaatgcaggatcctatactaatttaaaaccagaaatacaagcatgatataagcatcacacctctgaacgcacctccgtgcagctcataggaaggcaaccttccatcttggtttgcccagggcaggtccacattcactttgttgcttttaagtccagcttagcatttccaggaccaaaaaagtctgtggttaccccatgtatgatggatgaaaaggtgatctgctccatgtaaggctgcagaaggctgactctgtcccctttctattaaaatccatggtgagcagggatatggaactctgcatttctaattttaggctggaaaacttgcctctcaaataaattatggaagcagagcctttattgagaaagcaataaaacagtaagatctatttacaaaaagcaaccatctcaattttaattttctctacttttcttccagatattctctgtgtaaatgctatatttttcttccagtttcaatgaactgctcttgtagggatctctttgaagatttcagtgggttccgagcactgtgcccttgttcatttgtgctgagtggcgcacgctaggaccgaggctccctgagccccaccgtgctaactgatggctggtggcctttggaagcacgctgctatcttgaagacagcagggccttgagtaacggccaagtctggcctgtaaaaacacttgatctttgctccacttaagtctctctcgagaaaggtagcactgctctctcagtccactcttggtctccactcagtgaggaccagagtccgtactgatgacctggggacagagcagctgtgagctctgagtaaatgcctctctgcacctcctaccaaccctttgtttccttttccatcatcatatttgcttatctgaattttaaggcttctctcttttaaatctgcaaattttcagcgtgaccgaaatggattgctttgctcactgcatctgctttttgttcctcaggaagttcagcaggctggaaacaatgaccacttagtgtgcttatctgcttcgaagtaattgcaataccttatatttagacacaataaaaatacatgagagagctgggcataaattggacacaatgaatacttgttgcatgcgtaagtgggcaaagatgatagtataattttattcaaaattacaaatattgtctcttttcttttgaaacggactataatagaggtgtaaaggaccaattttaaatgtgctaagccttacaaatgccagtagaaagtttaatcatccagtgatatttataaaggaggaattgagaaatagacagaggtgctttgaatttagattttagactttgaaactgctacatgatttgaggcaaatgactcatcctacgtgtctctgttccctaatgtcaaatgaggaaatgtagttataatgaaaagttactctttatcacatgtgcaaaacttaactacaatgcatgtgcttaataaatgttagcaatgctcataattattatttatacaataaaatattggggaaaaggccacttagcaaaaatacaaattctagatttttcagtgaaatgaaatttcgtggcagttctgcaatatttctgtagggcactctgaatttctttctcctcaattaaaaaatatttactttaaaagttgctgggtgaaactgtagcataatacggattctgacatgctagagtatactgtaatactatagtaaataaaacagtgtaatagtggttaattaactgatagcaatcaattaaaaagaatagagagatcagaaatagactcacttagatctcagacaaaggagcaaacttaaaaagttaaaaaaagtgaaaattaagtaattaaatgaatgaaatattatgaaattaaaaagggttacttcactttcgaggctctgcatagagttatgtacaatattctgattttataagcaggaatctaagggtcatctaagtaaacatgtgactgatacacttattcccaactcatcataaaatgagaaaaataacagcaaccaaacaactccatgctttggtttaagttgtgagacaacgcgctctaaggttgggaacatgtcatgactttcagggagctgcacacaagttcctacacacctccccaccttctaacttatccacagttaccatgaagtgaatcatggaacttgcagctgagcgtcaggggcctgtggctaacattggactaagccatctccagatgatctagttaactccagtattgtcctcccctcataccacccttgctgatgccatcagaaatgccagagtccccttcggttatacaatgtttcaggaagaaaggaaatggcgggatagttagaagtaattatggatagacgtagaaagattcttgaagacagaatagtgtttttattctcactctgctcatacatttccattttcttcttttcccggaggagccatttccattgactgtgtcttcaacattcacctaaggacagttcagttcactcttagtccactgaacagaaatatttagagtgtgcttactatgtggcaggcctggttctgaaggccttacacgagtcatctcctttaatcctcacgtcaatcctatgagtaaagtactataatcaatccctttttagtgatgaaaacatgatcactaaataaagcagaggcccagagttataaagtgattttcacaaagttacagtctattcattggagacaccatgattccaaactactgggctcagaaagaacatgagctttaaatcagatatttcctccagcatttcatagggatattgattcaaattaaataaagctgcaaataatcacgttcatcaattaagtagtaaaagtgctatacagtgtcaccagtaagtactgacatatgcctaatattttaacaaggtaagggtggtcagtaaatggagttcttgctttagcaaacataaaataataataaatgtaatccaaacattgatctaggctgcgcgtagtggccaacatctgtaatcccagcactttaggaggctgagaccggaggatcacttaagcccaggagtttgagaccagcctgggcaacagggcaaggccctgtctctacaaaaaatacaaaaattagccaggcatggtggtgtgcacctgtaatcccagctacttgggaggaggctgagtcagaaggatcgtttgagcccaggaggtggcagtgaccgaagatcgcaccactgcactgcagcctgggtgacagaacgagactctgtctcaaaacaaaacaaaacaaaaattacctgaatctaaaatttgccagcctttgataaaatatttgaagcaatttcttctgtatgtgggtaaactgtcacagtagtgttcaaggcttctcaacatgtggggcaatacaatgtctgtactaactaggggacgcctcccaaatagactgttagtcatcatctacttttcaattagccaaccctggcaagtgtttttacatcagtgagatgtgattcaacggtactgtgatgatatcatagcttccactctcaaaatattctttcactaatttgtccttaggggctgtgtggagttgtaggaaggctgagaagtacataaagcgcatagctgatacatctttgccacagtttgtactgagatactcttaaatgttttcttacttttataagataaagtttaatttataaaaaaaggaatagtcatattctaattttctaaactagcaaaattgaggttctttgaataggtggtctaattacccaaatacattgatttcatttaatgtataaataaattaaataacaacaaataaattgaataattaaataaattaaagtaaaagtcggccccatgatttgactggttaatgcatgtttgtgtgtgagggtggggagtgctgacgggtttcatctttaccctggtactaaagtatctttttctctctaacacacatggcgacatcctctagcaaaactgtatcaatgggccgggcttggtggctcacacctgtaaccccagcactttgggaggccggggcaggcggatcacctgaggtcaggagtttgagaccagcgtgaccaacatggtgaaaccacgtctctacaaaaaatacaaaaaattagccgggcacggtaacaggcacctgtaatcccagctactcaggaggctgaagcaggagatcacttgaccctgggaggcggaggttgcagtgagccgggatcgtgccactgcactccagcatgggtgacagagcaagactctgtctcaaaaaaaaaaacaaaacaaaaaaacaaaaaacaaaaacaaaacaaacaaaaaactgtgtcaatgaagagaagattggcgcttcctttatgcaacacagtctgtaatttctatttcaatgtttcactgcaaggcatctagaaacttggcctagccaaggaggaagctcaggacctacctgaatgaataattgtatttacacataactttataatcttccaacctttggcttctatcctatcctaacaaaaatatataacaactgacagtgttcctaagtaccctttcgtggcaggcactgggctaagtattttttatagcaatgtaataaacaaataaaaccctataaggtaaatattatcgctattttagaatttgagaaaatgaggctcaataccattttttacacatttatttctctttggtttaaaaaaaagaggcagtttcagtgatctaaaaatatgatgaaagagagtctgtaacttgaatattttcaggcagaatttgaatctatgacttctatggcttcaagattaagcatgtttcactgtgaaaacacactccaatattattttaatcaagagctctcatttcactcccctgaatgacggtctttgtccagctcatgagacaggatgctgggcatctggtctcatcatcagcagagccgtcactcagcgatctgcctgctccgggtgagatctcagtcaacttcgcaatcatcctctgactcatctggagaggcctggggaagccactgcatccgggtctcctatcccagccgctaatgaccatggccctacaacattgtttctcctgactttacgttgttatgccccatacacctcagtgtcctgggggcaaaatccttcacagcccccttagtcgctatcctgcgatttcaccagcaccaccacaatttgtatacaccccactgaacttcaagttatgaccacatacccaaaagaagagactcagagaaacagactcaggaaagagactcgctgctttctgtggagcttgtcacttctaacgtgcctccttcgacctaagccaccagacatttatactttaacaataattttttttttttttgagacggagtctccctctgtcacccaggctggagtgcactggcgcgatatcggctcactacaaccttcacatcctgtgttctctcctgcctcagcctcccgagcatctgggataacaggcatgtcaccacacacagctaatttttgtatttttcgtagaggtggggtttcaccatgttggtcaggctggtctcgaacccctgacctcaaatgatctgcctgcctcggcctccagaagtgctgggattacaggcataagccaccacgcctggccacaacaatttctgagaatgaacttttctgaggcccatgtgccttttactataggctattctgagacctctggaccctaatatgcatggcaaaaatattattaggcattagtaatgtttctttggaaaaatgttaatattctaatggtactttgatctttatatcctaacaaaatgccattcaattatcaaaatagaagggtaaaaaaaagtgatcctgtttttttgtgtgattaacttggatatgacttctttatcatcaaaagtaacattaatattatattggtaaactcttaagaaggtttacaatattaaagttcttcttagtaataatcaggaatacatttattctagatgttgaatacaaatcaatacatagagataaatagataccaatagatagtcacccacactgtgtcaagtaatttgctatagtgagtaaaattggtcaggagtcaatgaatcaatactgttcatcaaatgcttgtcacgacaacaggcataatatgttctgggtatataaccaagtaggatgcaaggtcacttatcaatgagattatattctaggagaaaatgaaatatatatatgataatttttttttcaattattgtcagatgtccaagaaatgataaaatccgagtaatgtggaatataatgacttttgttaagagtgtgggataggctgacaattgtgggtgggctgacttagctgggtattgatacgaggagttgatactgaaattgctggtcaaattatggcagcaggcagccgcctggagattcatttatccattatacatatcgttactgagccctacaatgtccccagcacagttctacagtgaatagaacactaaaatccccacccttattccatgagagagacaataaacaaaataaataaatgtgtacatatatgtagttattaggtaataaaaagatataaagagaaaaatgaaacagaacgggaattagaaaatgtatgtgttgtgtgtgttatgcttgttatggtgtgtgtgttgtatgtgtgttttgtgtgtattgaatatagatgtgtgttggcgtcgtgtgtgtgtgtgttgtgtttgttatggtgtgtgtgttgtgtgtgttagggtatattatgtgctgtatgtgtgtttcgtgtatgttgaatatagatgtgtgttggcgtcttgtgtgtgtgtgtgtttgttatggtgtgtgcgtcgtgtgttggatataggggtgtgtgtgtgttgggtatgtgtgttgttagtgtgtgtgtgttgtgtgtgttggggtattatgtgttgtgtgtgtgttgggtatgtgtgttgtgttagtgtgtgtgtgttgtgtgtgttggagtgttatgtgttgtgtgtgttttgggtataggtgtgtttgctgtgtgtggcgtggtgtgtgtgtacatgctggagaggggctcacagatctcaccaacaaggtgaatgtgtccatagatggggcagggacctctgaaacccagggaggccatagctctgtcatggagtccaggaagagcctggtcatgctcaggggtccacacctcacttcctagacgtcggcttccaggagcacagcagcatgactgagcagacagacaggggtcactcaggctgaggattttcccaaactgacacccagaagactgatcaacagctctgcctgctgcacaccagggagtaactgtgtcaggcagacagctgcatacatgagtctgggaaagacggccaggccgaaaacaccatctgggaaagcatgtgcatagagacagtctttaagatcaggaggccgggtgagatccccaggttcaggttcagtggaaggccaggcccgagactccccaccctgcaaaactcaggagaaaaggaaggacccagccctgggcatgagagggaggctgggtgggtggacacagcagtggaggaggtgctccactgaactgctgtgggctttagagggaatgaaaggggagaacctggaggaagcaggtgccattctgcttcgaaagcaacaccaaaaaagaagtggaaagagcggtccaagcagaagtaacagaaagtgcagggagccaggggaacgcggcaaggaatgagccaggacatgaagcaataccggatcctaaagaccatagaaacctgctggattcattctgggtgtgaggggaaatcgcacatcattagcaccacgtgtagcttgccagttcagtatgtcaagaaaagtagtgaaaattgtatcctacctgagtttttaaagatgattaggacattagacgaagacatgaaagggaatttggaagagaaaaagtcacgtggaagaaagaacatcacaaaagaattggaggccctgcgtgtgtgtgtgtgtgtgtgtgtgtgtgtggttattgaagaagtgtagtacaaggatattgcaggagcacagggggacatatttccaaggacctcgaagacactgtctgaaaaccaggtttatcttatagatgcaataaacgctggaagactttggaacatgggcaaggatattaatccatctaaaattatagtgccgcgatgcagaatttgcaagctaatgccctttaccaaaaaacacttaatttcctgtaagaaatgacaaataaccacaaaaaaaaataatgactcaacgtgtcctgtatgctaaaactcacttttattaggtacactccaattaatcctcttggtagattgaatattaatataaaatcatgagaaatacaaatctggctttaccttatgataattagcgtttatcacagatacagaagagaacaataatataatatttgctaattgctttccaccaaataaaagaataatattattttgaaggatgatagtactagaggaaaatgttcacgtgtttcacaaaagcatccagaaaggaaatttaggtcgaaatatattaaaaataatgattagaaagattctagcaaattgtatttaaaagttactaaaacagcagtttggctggaaggaaggatgacagctaaaccctagtctgagcatattcaatacatgatgaactggattcagattataaatcaaccagcaaacacttttccaacttaaaatagcattatttgtttcatttcacagaaattaccattatattttttacaaggtatattcattgtactcatttgatatctttctaattattttctatctttgtaggaacaagacaaatcagaccttccaaaaactacacttgaagatatgggatagttttttccagtgttagaaatatgacttgtggaagacctaccatttgtatatttgcacacgtgcaaaaaaaagctgttaagattttcttatgggggacagggaatgagacatttcctacatatcagttaccttgaattttcacttgaagccatggttttcccagatacataatgaacgtatcttcttcggatgtcacatggttgatgttattccatatgcccttcaaacagacagttcaaaccataaaataggcaatttagacaggcacattgctcttcctgcaagtattctaataataataatatgcagtgcatgcaaaatatggtgccttccatctccgaagcacttcactaattacccaatgtgttcaccttggcttatctctttgacttgtcgtatactttcacatatcttcaaacgtgacttagttttcttctctgacataagctaccatggactgcttctgcacatctcttctctgtgaatataatgcaaatgcagtgaacccaacggatgtgacgaaagaaatgctaaagcaaatcaatataatcatttggtgtaattaaatgatctaatttaatccaattagtgtggtaattaatttgggcagatcaggaaaaaaatgagcgctttggaagattgaaacgtcatcattatataaccctgatgcacattaaagctcatccattttgcagataagacaacagtcagtaagggaagtccaattgtccattttaatcgttaaagtataggatcaagttataaactagatgtcaagaatatggaaataaggtcaacaggagtttctaaaatatatttcttctactctttatcatttgaattaaaatgtattcccatagtttaaattcccttatttctatattagtgtagctcatatgaactcccatgaaaatagatttatgaaagagaacactttatcagtcactttgccttccatatatgggccacgtggactatagagtttgggactgtagatcgtaggggccccaggatccagtaggtcatgggttctggtgaatgtggtcacattcctcttccattgagggcagacacaaggtagcagcttctcctgatgccatgaataactgcaggcccaatattgctaggtcatcaataatcagcataatcatcattcagtctaaattggcttttttgtttttgaaacttttcattcagtgaggctaaattatcaagtctgggcaaaacttatttctctccagaaaatggtagtcagtttcagtttcatgattctgtaattctgtaagcactctaatgaaaggatttaaccagaaaacattttcggttttctccttacacctttaaaatgtgttttaaataaaaccaggcttaagagatatgtactttttctgaattccctttgatcatctgagttcatcttgatatttaactcttggtctcttcgttatgtttatatcaaggctaattaattatcttgctgacttagtttgcttgtgtataaaatggaattctttaattgataagaaagcttcattgattagtttttaaagtttctgactttagttactcactaacaaagacttgctcatgtaagatgattttattacaagaatatagcagttcccccttctgactgctgctggaattgttttgactctgtgggcgccaaacatgaatcattcataatcctccagaggttcagagattgcctcatccaattacataggaatagaaagtaatttagttattttcttatataaaatttgatgaaaattcatgtgttacaatgcacttctaaaaagtagtgatggaaatgctaaaatttatacttccttttttaggtctgccatcatctccaggttgtttctcattcactatttgaggtaaaagaatgtgctctctagccattacgcaaagtgagtttttccctttagtgaatcaattatattctttaattgtatgctgaaaccacttgaaaagcattttacttctatggttacaattcaatttaaccacctgtaatccaatcaggctatacattgttttatgtattttaatagatcctttttttctgtttatttaaaaaattatatgatataaacggtatgatgaataattgatgaaacatcttgttttgcttctagttcccagtgatgctgttctcaaatctatctagacagcagtccccttcacagcaatattttccatagcacttgaaaagatattttagcttctgcagtgacaaacgcctgtttagaaagtggaagcataatttacttacctgactgatgaagcattttttacaatctactacatttgttttatatggagatgggtctttgctaagaaaacagggtctttaacaattgcaaaactccattattacattttatgatggagcaaactagattagagcaattctccttcttgttttattaagcctttatactactgttagaggttaatggcgctattatttttcctaccgtcaaaatctgctttaaagcaagacctacagcacttagtgctagaaatctggcacacggattagcaggcatgcctgcttctgcagcagtgttagaaatcactctggcctactaccattcagataaatcacacgttcctaatacagcactcgcgtccctaaaagcaagacctgatgatgagaggcatttctggcaatctagtaacacgcctggtattccttaataatattattgtgaagcaaaatgtgtttctcacagatgagtaaagaggatcatgttcattactgaagattatccatatgcggactaatagagtgaaaatgtatctggttatctggaaaattatggcctgatgaaaatgtccgtgggaaaatgatttctgaaataaagtttctgagcttgaaactacataagcatcatttgcaattgattggattaggggacatgtcacaacttccattctgtggtatcctgtgttctaagtcaggcatccaggctgatgaaggtcctcactccattctcctttcctttcatcccaccctccttgtacccacatcccacctcaagctctggatctagcgaagcactctgcagaaaggcagcatgcattcgctgaaattcttcaaatgaccttcctaaaagcaagcatgtctcagccattgactcagtaacaaatgaactccttcagcagtgggatggaggaaaattagtacattacactgtgttttctgactgactagagcacacaatgtagactgacaattagtttttattaccagctgctatcaccttgtgacagaaacttgaaaaatttctcataattttcctgtttccttccatgcagtggatatcatgattctgaaactagtgtgttttactgacatggatgaattatttaattatttgtgcttttctccatacaacacataacattttgataatgggcacagttttctcttagccagtacctagcaagtctacagataagacatttcagccacggaggaagtcctttaaagaggacttggtggcgcctcacatggccctgctttcctacggctttccatcctctatttctatggatttctatattttatgggttgatctactaatattttgaaagatagtgaatttccatttttactcaatcatcagtaaatgttactaccgttatgacagcactctgtgtgacaaatatttactggtgatctgaaacactataagactataatttcccctggagaaggaacagatgctgatcatctttatgacagcttctggatgctccgcaacgagggactgttgaatgtgtgagtgaagatgtgaaatataaaaatctaattgaagaaaaacatgagcaccctcttcccacacgacacaccatcccataactacatccctgggttatatcccatagctacatccctgggttatatcccataactacatccctgggttatatcccataactacatccctgggttatatcccataactacatccctgggttattcaattcaccacctgagcatctgttgtgttcctgagactcttataaattcttagtagagatcagagaacaaagtagaaaatatgcctgtcctcataagaatgatacaaagggctctgtggacgttgggggaagagtgggagtggggcgagggataaaagacaacaaatatggtgcagcgtatactgctcaggtaatgggtgcaccaacatctcacaaatcaccactgaagagcttactcatgtaaccatataccacctgtaccccaataacttatggaaaaaatacgaaaaataattttttacaaaagaaaatatacctgccctcatgtagttcagtttatattctactgggagatgtgagagaaatgaaatgaacagggttactttatgtgtgtgtttatgatacacactcaaataaacatacacgtatatgtatatgtaatatgttataataacttaaaaaacacaaaaacagagcaagtaacagaagaagatagaaggtgtggatgctcaagtcaacagccataccaccctgaatgcacctgatctcggaacctaagcagggtcggggctggttagtacttggatgggagaagttgtggatgctcaagatacatgatatttagttagggtgatcagtgacagctgccagagaaagcgaattttaagaaacgatgtgagggagggaggatgtgatacggcttctttgggacattatttcaggctgaggagagaggagagcaaagtccctggggtgttgagtgtccaatgtcctcaagaaacagcccagaaaccaagaggaccaggatgcaagggtgggagcaaaggagttctttgggtcttcataaggaatttggactcgttctgcctgtgacgggaaacgtttgagggtctggagaagaggaaggatgtggttctactgatatttcacccagatccttctgattgcagggtgggactttgtcagggcagggagaggctgaggatgacatgatgatacaggtgaggggcgacggtggtttgggggtaacgagaaaggcttgggatatgtcggggggcagtcagggctcaccaagaggccggagagaggggtgctgtgaaggtctagggactgaatggtggaagtcacagacttcttctgtgagaggtaagagggagagagatgcctgttagacatcaacgtgactcccaagtaagcccgtggataggaagttctggcccgtagaagagaaatgcaggttaagccacgtaatccacctcagtccattctggaattggatcatctcgggacaactttccgaagatgaatatgagtgagctggttttcttctctctttatttctcatggtagccctattcatgataattcatgacttctctttttctttgtctcagcttctacagatcccagagagagaacagttgcgaaagtctgtccccgggctgaaccgaagctgctgctggcggttatggtgctaaactcagaggctgacatgagggcaaaagactcttcaggatataggattaaaccttattttttttttttagcatattggaatttaacgattaagagaagattacccactagtgtattttatttgttcataaattattccaaacttaagacaactaaaactacgaatattataattataagtagataaatacaagtggaaaattattttctgaagtatattttgcaaaatggttcaatcagtcagggtatttacaaaagacaatccaaacactctacagttataattacatcattaagtatatacagtaattgagacatcactttatgtggccttctaaaaacagagatacaagttttaaaatctgcccttccaaattatgcctgagccacaacaaaagccagagggagatggaaccactgtgtgtcgttatgaaggacaagagtccatcagttgcttttcattaactgaactgtctctttggaaactaggggcgaatatcattctgttttgcttcaggtctcttttttttttcttttcagggtaagaaaacattgattgcccaatacaaacaaagagcaaggaagtgaacgtttatggttaaatacaggagaattccaggggcatttattttataatgttgtgttgttatttttcccaggggcataaaggcaatgcattagagtgctcagttttccacatttaaaaaatcatctttttattaaataatggttctggattaattgccccatcctgcatggctacaaagtgttgtaactgcaaatgctcctccgtacacagcatgtcccatcagctcatctgagtgagctacaacaaatcaatatcgaattgggcaagtcatttgtctttaactttacatgtggggaaaatctctacttcaaaataacaaccaatgttttgtttatctttcttcctagagatgtatatattttggagttagaagggcatccacagattatctactttagtaatcctcacattgagagctgctaaaactggtttctgccaagaagaatgctcagaagaagaagaagaaatgacaggtactgttaccatcattaaaaaatagagtgctggccaggtgcggtggctcatgcctgtaatcccagcactttgggaggccgaggcaggcagatcgcctgaggtcaggaattcaagatcagcttttccaacatggtgaaaccccatatctactaaaaaatagaaaaattagccgggcatcgtggtgcatgcctgtaatcccagctactcaggaggctgaggcaggagaatcgctggaacctgggaggtgcaggttgcagttagctgagatcgcaccacactccagcctgggtgacagaacgagactctgtctcaataacaaacaaatatatacagtgtcagtttaataatttctttggtattgaaataatctactttcagaataaagagcagttcaccatttcagggtgagaaagaaaatgggggatgggtgcttgctcagtttattccagatgcccttttggagacataatattgcccatttacattgcactttttccaagaataaaataattcaaaatttagagcatataaaccacgtaattataaaatacttagatatttaagatattaatgactatcttaatatctttgggtttttcttcaaacattactgattacaagctggtgaaaaaggaaattctaaatcttctcattctacacttaatgttgagagtcgccctcaccgcacagaagagttgaaatatctctaaagactacagtcgcgctgccctatgtggttaggttttgtgcatgttaatgatgaaatgaattgtggagggttgaaagcaaggctgtgtaaagaagctgatgaacgtgggttcccaaagcaaaattcacaaaagactcatcagattaggaggcataaatgaaagaatctatagggcttttgttccaaagcacagagattcctttctcccttttcattcattcattcattcattcattcattcattcattcattcatcagtagatactggttgtgtactggtagcttgggctgtcaggggatgaggaggtatggtgtgtgatctgtgggtcatggatgggaaaaccccaaactttcaaggggctcatcttgaactaaaggtacaatcaaggtaggtctggtagaaaaatttcactggcctagcaggaagaagcagaggaagagatgagcctgcaggatgtgcacgacttccaaacacaggcactttcatctttcaagtgaaaaaagcaggagtttgttttaaatctatggccagctattacatacctgtataaacttaactctcagctgggcatggtggctcatgactgtaatcccagcacttaaggaggccaaggcaggaagatcacctgaggtcaggagtttgagaccagcctggccaatggtgaaaccccatctctactgaaaatacaaaaaaattagtcggacatggtggcacacacctgtactccctgctatttgggaggctgagacaggagaatcacatgaacccgggaggtagaggtttcagtgagctgagatcctgccactgcactccaacctgggtgtcagagtgaaactccatctcaaaaaacaaaaacaaaaaaacttagctctcttaagtcttataattagagcagtcctccatcactgtggcagaagaaaaaaaccagtcagttagacagtgaaggctggttgttggagatgcagccggcctgaaaaatcacagctacaggcaaaaatagagcagcctgggaaaagtcagtctgcacctggacagatgagcaagcaggattcagcacagaagccttctgttctttgcgtgattagcgagctcccaggaaaaatttcctccctttttcaggcatatacccagtgggctccataggaactcacacagggaggagggggccttcctaaaacaaatccacagttatacaaacaagagaagtggtactttgtacttgcctagggacataaccacaacaacataaataaggggtagttatgcagacagctttacagattagaaaagtgactcaaacagctagagagataagaggagtttctcataaaagctttgtaattcagctgtcaaagcagcaacccatttgagatcccctctgccttgtgaaaagctttcttctctcgcttattaaactttcactccaacctcaccctttgtggccacgccccttaattttcttggtcatgagacaataagcttggataacaccttagacaaccagaccactgaccttgatctgtttaattatcaaactgcaagtttcctgaggctgtcagggaaattctcccattccttgtcatgatctctctctttttcttcctgcacttgctgaactcttgctgatgccctgacagtgagcagaggggagggtaataatgaacaggactttgggtggatctgatatagtcagagggcatggatttcttgctttgcccagtgtttgtttttacttttattttttaacatctagaactttgggtagaacttgccctctcgaattcaccaaaaccttgaacattttctatcaccatgacagggtcccaccaggaaacagatgtcatttggagaagaagccagtcaggcaaggctactttcaaaggctctgtttgcaaaagggtgaatctggggacaccaccagggacagggcagtggcaggggaaggagtcgccactgagctgtggctgctttctgcactgaaggcaacaaggggcacaagttggtgctgaaatccagagggacatgaacgcacaaggtcaccctctgcaaagagctgtgacctctgatttttgtgccttggagcagagacagcttcagggggctgcaggaggcagctcagccttccatccataccctggtgcttcccacgggcagaatacaggagctgctagcagtgtccacccctgtctggctttggtgaagccagcactggatgaaaacttcttaacggggacagcctcacactctacagtgaacagataattccctggccactgctgtcacttcttttactcccaggggagtcttctgaaaaagaacgatcataaacaaacaaaaatgtccagcttacagaataaaaaatactaagatggaagcaaacagagggggctgtggaacaagagctaacagtgcctgcagaccctgagctagacattttccataaatcttctgtcatatccgcaacaaaacccttagttggggaaaggattatatcacttctgcaagagaggtttgtgtgcttggatctaatctctagaatctcaagaactgtggtctcccagaggaacccagatcttggggtgaagcagaagtggagagactcaagttaatggaatggcttgaaaaggaatgaggcctccactgaaggcaccagcacttcactccctgcagacagaagatgaaatcctcatgtcagcaataggcatgtgggcagccagtgtcaccttgggtatcaagaacgtaaagcactttcatactcagtctcctacagatggtaaaggattcatgaggtgctgaagaggaaacggggctcatggtgggaacgcctaaggcacgcatgacgcgctggaacgtggcctggcctgtgcctacctcccctaccgttcgccccgtgtggttcacttccctccatttactatggaaggctcctaaggtgaacagaatgcccactgcatgccacactctgcaacaggcagtttacacccctcttgatttatcggagtgacaaccctatggaaaggattactattttattaataattgtgtaagcgatgacatttgaacttgaataaggcatatacttgcacagctattgaatgcttgcctgtcgcttcaaaccctatgtcctttcatcagtgaaacaatttcattttctctgtcatacctttctttggaatgacacattaccattgattaccttcctcatcttagaaggctcaaggtttccattcctcattttccctaatgattaattcccatgcttgacaaatactttaataccgttaaaagaaaggacagaacgctaataccaaatgagtcattatgcatatgtcaatttgtgttcagatgaggacagaagagatattctccttattacaaaagaaaaaaagctctgcctcaatcttacagtagcagaaaaatctgatgcccaaatgatcggatatccaacctgatattgatttaatgtaagagtttggccggatatgtggttctacattgaactttagatcatttgtgcagggttttatcataaaaatcattttcaaactactgtaaatactatatctccctctacagaacattctatactaaaagctaacaatatcaaaatgttaaaattttatttttaaaaaaccctttattccttctactgtttctcagatttttttcccttcagttttcccatccttttccaatctaatttcattaaagggtgactggctgtgattattcaatagaaagtgccatgcaaacatttacagattgattttttttttcttttggaagtgggagacacctaagaccagaggggtagtcagagtatggtagctcctctctgcctctgaggcccaggggacatgtttacctctctgtcctctcaacctgcgcaggactgagcacagactatggattattgtcacacaagcaattgtcaggaaatcctaaagtgataaagatgtaggtcaatctatagtatcgttgtcaaaagattgtgattgtttcttttattagttttagcagaatatttgttgcatataaaacctcatgcagaagtctgctctagcatgcagatgtaaacagaattgacccgagagggttcagatgtccatcccagcccttccactaattgctaggcaacggaaaaacaatatgcacagatgcaaaacaccggggacaggcgcacccacagagcaaggctagaaacatcacatgaaaagattgccagggaagcatagaaaacacaacccaatgggtagaaagtcctagaagaagcgtgagcagaaaacggcccctacaggaagtcaacccacttggtatctcagtagacggtactcatctctcgtttgtaagaaaagcaaaccctcagtgaagctggtacccagtaactgttatgacatgtgtaaggtcgtgtggggagcaaaaccagtggagagctgactgcacctgcagagaaagaagggtctgcatagtgagtctccaaggagcacataggctgttggctttcagctaaaggacaaagggcccttctggcagagaagcaccatgacccagtccaggcatggtcagggcttcctatggctgagtgatgacgatgggcatttaggagaaggcaccaaaatggcaggtgtgggagacaccttcattcctcccacagctattgatctggtatctaccaggtcctgggcacgtgcaaaagtcatcagccagacatgtctgcagatcttgttttctctttggaaggacgtagacattgcccgaaagctactttactctccaggcagtgaatggtcaataatatttcaatagacaaaagacaaaaaccaacttctcctttgcagagatcagtctggtctggtgtgtgtggggtgtgcaaggacggagagagactggtatgaaaatgactgaccgtgtcacatatacttaagagagacatctggagggtccagtctcagacagtgatcagggcagacgtgacacatggttaggagttagaaccaccacgacattcctccgtaacaaagtgaagttagtgcatgttctttctcccagaaaatacttttggatatagaaaagaaggaagagataacgtggggaaggtggtgggtgggatcgcttcttaactgctccattctctcctctgcttacaagggcgtatcaatcctcagatagaaaggaaagggactcacagacagagtttttatggcttccatccttgctgggcagcatcttgactcctcttgacttcaactcaatcgcctttttcactggaagaaacaaaaccaagccattagcaggtaagacttggagatcataaaaccatgttgtatccacacagcacttccagtcataactgctttctatcaacccccgaaaatgggaaatgttctaagaggtgaatgataccaagtcaatgaagtcaaagagcttgtaaataattattgtgaggctatcaagcagcaagatcacatcttacagcatcagtgtcggaagctaaaaataatacgtgctgccactgactttacacatccaatcctatttaccactaggagtggcagattccaccaatcattatcattccccaaattgttcaggcagatcactcacttcatgtatctatcctgactacagagttgtctaagtttgctataatcatgaaaaaaagtttagataaaaaggccagttgctcattcatgtattcatatattcatttactcacagtttagcgaatctgtgtgggtggggagcaagtagaggaaaggcatgctctacgtgctgtagataaagtgctagacaccaccagtccctccagacgctttccaggctgtgcaaaaggcacagaggtcctggcttctagcatcatcattctgagagttaaatatgtttcttgatgtactacggcctgcattaaacattttaagaagtttcattttttttttttggtcacttacggaaaaaaaatgggggatgcatcttgtgattatagaatataaaatgttatgatcttctaagctatcccacacttggctttactaagtgcccagtggaaacatttctgaggtccccatatgagactggacctacagcagctgcgagcaggcagatcggctccaaatctttgcttacaacagggtggccccatgacctaggtaagttacttgcctctgagcctgtgactctatgtgtaaatagctgtgagggttagttttatgtgtgaacctgactgcaccacaaggtgctcagacattgggccagaggagattctgggggtgtctgtgagaatgtcatggatgatattaacatttgaatcagctgactcaggaaagaagatggctctccccagtgtgggtgggcctggtccagtcagatgaaggcccaaatagaacaaaaggctgatctgccccagtagaggcaagacttcctcctgcctgatgggctttaaattgcagcagcatgtttttttttttttttttttttttttttttccctgctttctgctttctgactggagctaaaacaccggctttcctggtctccaacttgctgacttacccctttcaggtcttcggtcttgtcagcttcataatcatgtgagtcagttccttatagtaaatctgtgtgtgtacgtgtgtgtgtgtgtgtgtacacatgcacataaggagattcatatagatatgaagtatatacaggagacccctgaagcatacaaggggttggggcactgaccaacccccaacccccacacacagctgaaaacctgattatatcttttggctcccccaaaaacctaaatgaaaatagcccactcttgaccagatgccttaccaataacataaacagttacttaacatatagactcatatctacatatattttacgcattcatgacacacctttttggatttttttcctgatatttttaggctataagagttgtctgcaagttttttgtttttaattgtcgcaaatttccaaaaaatgcttctatacattcattgaacagagtctaaaaataagtggatccatgcagtttaaacctatgctgctcaagggttaactgtataaataaatctatctatacacactcaggcacacacacatacccacgaccaactggctttgtttctctggagaactctgacgaaatacaatgccaggatgccaagactgtgtaaggctggagacgatcaatgcaccatctttagtatggtgtcctgagcccagccaactcagtaaccgactgtgtgtggcagtgattgttactcttttcaaatcactgacattcagagggctgggcttaggtggacaattgccctttgggactgtcttccctcactgatgtcactaagcacctgcttcctctctggtcttcctgtgcttggcccctgtgtattctgacacacctggagaccatgcctcttggactctacccctcagagtccctgaaaccatgtgttagcctctttgcagcgacactgtgcagtatttttcacttcaggaggcatcctccaaccttccaaaagccatctgagataggaattatgacaccgccagctcatatcaggaagcaaggctcacagatgcacagggaagactatgcagaatttgaactgaaatcttccagccccaaactccaaacctttccacgtgggctactggctggggagcatggagacaggagggcagggctgcaggagctggtccacctggaaggaggagggtgagatcccgaagcaatgccgccagctgtgcttctgtatcatgccttgaccttggacttcccagtatcaagagcggtgagaaacacatattatgtctaaactgccaagtctgagatattttcctatagcaaatgtttgctatatttcctatagcaatattttccccaaaagacagcacttctcctgggtattttaaaagggtaagagggagaaacgagagactggaaggaacatacaaactttgaggagcttttcccaacagtgtagcttagcaatgaagaaataagtccaatgtggttacatggctggaaaaaactgttgtcatcagagccatgaatagaccacagggatcctggcattgactcttgtggaagacgaggaggtgggccacccagatccccctccaaggaagggctggccagagggtggctgttcatcttcagcccgtttcagagaaagcccagagacagacagtcacctatcccaggctcacaacgtccagcccaggtccaaccccaaccaaagggcgctggttcatgaacgtcctgcactacggaactctcagagagggacttgctctggtgcaaccacggcacctggcgtcttcctcctcttctcttctgcctcttcatgtgtgtgttttctcatcctcatctctgtgttgtggtgacaaatatcacaggaaagggaacacgagatggggtatctgcttccacttctgcggttctcctggtggcacactcagaagtcctctgccagctctccccaggataatgctttcatccaaaatggcaaacgtatcacccccactatcttgtgctgaaataactttatcttgaagttactcaggagagaggagatgaatgcacaataaataacaaataagaaaatcaatgggaaataataaagagcatagaactcaacgcaaatgtcactcaccctaaacagataagacaaacagagatctgtttactcagaatctaaacagaaaattcgagtagtctctcagggacgatcaaggtatgcgaatagacaggacctatctgaaagctggatgagctaataaatttcgtactcttgcaaacaagtgtttgatgctctgtaaagctacgtctccactagggaatatatgtatttatttattatttttcaacaagacagtgttatactgatgtagactatctgctctcctgagttgtaatttgtttcaagttactacgttctcttattggacagctctgctaatcttggcaacgttgtacaaaaagggaaggtgacttgtgggtccagggtccacccggtgtctggacacttctccccacacgttttttgggttctcctcttttcttccttccacacccttccctcgcctcttcctccctccaactgccctcagagctgagcagagattttcatttgcaaagaaacaggagagagagagagagagagagagagacagacagacagacagacagacagacagacagacagacagacagagagagagagaaactagagctgcaggaatgcaggagaaaggtaagtcacctatggcaaatccctgcaatagcctcttctttctcctgaattaaactattgagtcattcattctcagatcttcgaatgaatgataaaaatatttcgtgattgatgacaaaacatagcttttgtgtctaatctcagacctgctaagtcacaatcttcggaggtgagcttggtttagctttgttagtccagttatctagttttcatatgagtttctgttttgttttattgtgtggaagataacttcaatgcacgccaaagttagtctcacattccctggtgtctgttgggtaaggtgattccttagtaattcagattcaacaatttcaaatacattgtggtctacagaggccagggctgggggacctggggagatgctggtcaaaagatggacaatttcagtttgacagaaggaataagttcaagagatccctgatacatcattgtgactgtagttaataacaatgtattgtgtgcttcaaaggtgctgagagttgactttaggttttctcatcgcaaaccaagaagtatgtgaggttaaaaaaaaaattccccaaaagcaacaaacaaaaacttgaaataaatatgacgaatctcttttctgataacaacatttaggaagataaattatgggggaaatatttttagtttaagggctgaaaaatcaaaaaccaccacaataaatatacctaagggatacattaattttgttgtgtcatttactttagttttccttttttctcctacatcagctgccttcactataatctctaagtggttaggttaaaactcactttctgtaggttgtttgaaaatgtgacgaaaccattactatatttgaatggcagtggattcttattactgtttttaaaatggcaataatgtaagaagtgaatacaactattgctacttgatgccacttctttctctgccctctctagctggagcgtcctgccctcctctgtagcccctgggaaagctcagcctgctcccctgtccctccctgtaatccctctgccccagcccccacagccagacatctgccttcctcaagatccactgaacttccaagacctctcttaggaaaccaagtcgtatcttctgctcttaatacacccgtaccgtccttcattagataatatgactcactgtctgaaagaagctttacctataaagggagatcagataaccccaaacaaataaataaaatgcaaaattctttcaaacaaatgtaacgtactcaatatgaggagatgccattgcaaatcctcacaaatcacagaggaaattgttttgtgtatagagaccaactacttgcaaatttgaagaattcagagtttgggagaaatgggtgaaaaatataaatcttgtgtcttcaacttttcattaacttgcatgtttactgtaattttatcaatgcctcttccaggcaaaaagttttatttaagtactgcaccaaaagaatatttactactattggtagcaataatattgaaatctttgtaaatccttagaattgcaagggctcactatgcagatagatagatagatagatagatagatagatagatgtccacatacacacatatgtatataatcatgtatatatataaatgtataaaatataagtatataacatataagtttatacgtatttagaaagttaataacatattacatattatatatgtatataataagctccatatataacatataaatgaatctattaagctcccaatgtcagacatactattgttctctaatttaatttgtcttacaattatttaatcaatagatttctgttaaatttgagaagtaatcacattccataagctactaatcttttatatttaccttttctttttatagtatcacagcaaatggaatttccaattccatcatatatattaacttacatttgggaaaacagtgtatttagacttttttgaccaggcatggtggttcacatctgtaatcccagcactttgggaggctgagacaggggatcacatgaagttaggagttcaacagcagcctggccaacatggcgaaaccccatctctatcccaaaaaaaaaaaaaaaaaaaattagccccagccaggcatggtggcgggcgactgtagtcccagctagttgggaggctgaggaactagaattgcttgaaccccggaggcagagtttgcagtgagccgaaacggtgccactgtactccagcctgggccacacagtgagaccctttagtttctcaaaaaaacaacaacacaagaatttttttaatggcttattggttatttggagcattttttgtctagtttatgattgcaagataaaaattaaactgttcttgaattatctcagagctttatcaattttttaagtgaaacatgttttgaacacaacacacctggagaaatctcaatggtttacattgtttcgcttttactctaggactctctttttctaggagcatttacactataataaattattttctaatattagaatttagaattgctttcaaaatgtttaacttattcattaatagacacaattacataatccccttcccctccaaattttaacatttcttcattagatttttttgtgttttacactgaggaagagtcatcgaaattcagatcaccttatattttaaacacacatttaattattttttgcaaattattcatcaaagtacctgtatagttaaacaccctaagacccattaaatttctaagtaagcgttgagccaatttcctattctctgctaattattgttaacgtgtgatttgtgctgatacactgtaaacatcagtaggagctatgtctctactgtggttgttttcctgaaggatggaaccatttcacagtctaaaacctgagcctccaggtctgccctaaagctcatcaccttgaaaatgtggttccgtcatttttctcctcttctgcatgatcattttttcttttctgcatgattaacccaattataaaaatgtgttgttccatttcccatctttacaaactaagacaaagcaagcaaccttttttatttagttttagctttttgagacagagtctcactctgtcatccacgctggagtgcagtgacacaatctggactcactgcaacctccacctcccgggttcaagtgattctcctgccttggcctcctgagtagccgggattacaggcacctgccaccaaacccacctattttttgtatttttagtagagacacggtttcaccatgttggccaaactggtctcaaactcccgacctcatgtgatcctcccgccctggcctcccaaagtgctgggattgcaggcatgagccacagcgcccggcctgcaaacagctttttaaaaggcacacggcctgcagacagacaggaatctttccctccacattcctctgcagctgctgcagcccctactccctgtggacatgatggaggaaacccctcagatgaacggttctctttgcatctcttcccattctctcttaaatctcatcagctgtaatttctctgttgctaaatattttggtcgaatgtccaccctcctgttcactctgaaacaatcagccacttcctcctgaaagcactttctgccctttgcttccagaactccaccctgtttgggttccttctaattcactggccgctccttgttcacagggatgggtgttgcctatggcactttactatttattgccatactgtggctggaaagtggtcctgatccagaccccaagagagtgttcttgaatctcatgcaaaacagaattcagtgggagtccacagactaaagtgaaagcaagtttattgagaaaatagaggaataaaagaagggctactccatagacagaacagtcttgaaggccgctggttgcccatttttatggttatttcttgatgatatgctaaacaaggggtggattattcatgcctcccttttttagaccatatagagtaactttgtgatgctgcattcgtaaactgtaaactgtcatggtgctgatgtgagtgcagcagtgaggatggccagagtcactctcgtccccgtcttggtttcgggagatttgcgccggcttctttactgcaacctatttcatcaggaaggactttatggcctgtgtcttgtgctaacctcctctctcatcctgtgactaagagttccttaacctcctgggaatgcagcccagcaggcctcagccttactttctccagcccctattcaagatggagttgctctggttcaaacgcctcttgacaatatggttcaactttccatttaactctgttggtcacttatccgatggaagtatggtagtcatctaataaaacattatcatcatcggaattatcaagagtaatagttttaaaaaatattttgtacatggtactaaaatgctggagtacatcctatttaattccaccaaaatgttataagatttatgctactcctacaatcatttacaaaaaaataaaaaattgaggtacaaagaacttaaaaaataaaggtcacaaagcttgaaatggtagaagcagggtttgctgtggtgaagtctgatactagaacctgctggctttaccatatctcaacagtctgcttcagaaattatagccctgactttaaccacaccttacacttaaaatttttattttcgtcgataattattacattttttcattgataattattacatttcaaaattatattagtaaacgtacctttccattatgctacattttttaaattcagattttgattaatcaactctttcaacgcttatctcagaagtattttaatgaacttgtatgtcagttgtttaaatatgattaaacatctattaatattagtcccactataataaaagatatacactgagtcacacagtattaattttgtttttcttttccatgaaatgctttttttatcatttattgtaactgtgaaatattcatgaagatattgttgtaggacgttccccttagttcagctaaaaacagggtccttgtcacatggccatgaaagattaggttcacaggttattgcagaatatttgagaaaatttttaaataatcaagaagaaaatgtaactgtgtaaacccatcaccacagacaaccactgttagaacgtttatgtatttattattaatgctatgtgcattgtatatataagttgataggtgaagacacttaatattggtagaataaaaataaagttgttaatatttattattctgcctttatgacctctttgaacagttttcctaaggtatttttaatagattattcataatgtatttaattcctttatcattagaaattagtttttctcacttactacaattgtacattacaccaatcacctatcaaattctgctcagtttccaagaataatttgctagaactagaattctttagtcaaggctgttaatctactaggctaaactgatttctagaactataggaccagtttacttcacctgatgtaaataagaatatcttaactaaagcctctctgcccacattgttttagtacataaaagaaaatgttcagtaatttggtggttgaaaaatgctatcttatttttattaacatttaaaataatgcgctattggatcattctttgggataaatctattattgtctcatggtctgtacattacgagaagcgagttgttagtacaataactctttctttttttaaagtctggaaacagttgttgtcttcacaaggttattttgactgcagctcccattgtcagcttacaaatattcaggcattcctgcattttttttattggatttttgatgtccttgaatagggacttttgagaaaaactgacaaccaagttttaagaactacattatcaaattttatttctacccttaaatcagtcagtgtcctttccttggtcaggaaaatcatcctctgaaagcctgatgttataagtcatcttttgcaccaggaaagacagaggtacttacttacaatgtgaaccatttgtactgttgatattcctgattggttatcagaatcttttaatttaatgtcgcttaatagcagcactaaattaaaagataaatgtctcatatatgaagttatagtattacatgaatcattgtgtcaaggtagtatggaggattagcgtgagaatgtccacaaaaccttgatgactgaactctttactaatgtaaagggtaattagcataagatgctttactggaagaaaggcaattaactattcatctcacgtttccttaccaaatcagggaccccatttaaatcacgtatttccctgtgatttaagttttcagacataagcaggatttaacttggaagcaggtggaatttaaagattgttttacttagtcttgtagtgatctatcggtttacaccaccggagccaatttaaaccttttccctccaaacagagggagaatagaaggagcgagaagataagaaagcgcaaagggggaggcagaacaaggggtgagacaacgcgctcagaaacaacattcttcctgcactctacgtattgagatgtagaaaaccctcctgaggtggaaaacagaggtgtctcagacgattcgcaaattccaagaaagattttgtgtcctgttctattaactcgttcttcttttctatacttcgttgcattaaagtctttgccactataatttcccaaatttcctactgggattatcaaaagccttccaaggtgttcaccttgcaaggtgaacaacgtttttacaaaaaccccagtttcagcaaaaaggccactgccctagaggcccagatagctgagctccaatctcacccctgaaatgttctgaaatcctgagccacagcctcggattttttcatctgttaaaagaagggcttgaattaactaccctaaaagtctagtttctcattctttttccaggcacataatgcagaatctcaagaaaagtgggtggtatttaactcagaacaaagttcccattttccctggaccattcattacaatgaagactttgggaaaattaacttcagtgacttcttttgacatgtaagagcaataatacatctcttgcaagagtgctgtgatgaacgaaaaagatgctctatgcacagaggaaagtgcactctgggtagggcggtcagatgagcttggggaagtccaggggtgtcattcacatagaacacactgtagcccccataccagccacatattatgtacaaatatatactggctgctttccattcctcctgtgtggaaggcatttccagttctacgtgtgtccagcttttggatctttaacaggaaaaatctccctcacagtggggattttgaagttagttgtaagaaagacttaatcattgttctggaactcattagagatgtcaccttgccaggttaaaaatgcctctaaatcgcagattcctcgtgtgtttaataaagatgatcaccacctgaccctcagagctgtggtgaagattacatgacatggcaaatagaagcacctagtgcaatgtctagcctgtgtggttacacaaagtgcatggaaaatacttctcagaaaatgaagaactttccaagtctttgttacattcaacgtggaatgttaatgcaactctttattcagcttttcccgttaaacttcaccgcacacaggaagctggggatgaacctctccactccccaagtaagacgtccatggagttggaaacatgccacgtcatcttcacttccaatggagaaattggcacatcttaccatttaatcaatcaatagagcttacagaagaaaaaagaaaggggagagagaggagaagctactggaaagtgactttggcaactcctgatactgcttctgccttttctatctatgggaataataaaagctgtccaggcacaacaacctcactgtaaactatttcctttaagcacttcaacagaatacatgtgtcctttcagatctgtgaacaacacattcaacaataaccacttcctttctgctgccatagaccttttgttgtctcaacactgggggctaaccttcttaaacaggggtgacacttcacagtaggagaaacctcacagcattggtggtcaaagtctttattcttacacacacacacacacacacacacacacacacacaccagcacatttctccttcatgacccatgggaagcttaaatgatacctagttccaggcatgtactctaagccctgggagattcattttacagagcaaagctgtaacaccttcagatgctgacacgatccaaaacagcttcaggagatgtgaacatctaacgtttgagactttttttttcgagagtctcgctctgttgcccaggttgaagtgcaatggcgtgatctcggctcactgcatgcaacctccgcttcccgggttcaagtgtttctcctgcctcagcctcccaactagctgggattacaggcacccaccactacacccggctaatttattttttttgtatttttagtacagacggggtttcaccatgttagtcacgctggtctcaaactcccgaccttgggtgatctgcccgcctcggcctcccaaagtgctgggattacaggtgtgagccaccatgcccggccagttgcgacttttgcataatgggaagatcaggtggtcctgaaacaccatttttttttctccagcctctgcgtgattttcaaaggaatgcaattttatttgtgaaactcctaaatccaatcattttttttccttttataagcagcaatgcccctcaaggatctgagatgagtggccacatattcgggtgtgtaagtgagtgtgtgtggctgtggatttttactagtgacggcagatgaaagtgaatcatcaacgtctctagcccaggtttttaggatcagtcccatgtttctgattcctcagaaaacatcaaacagttagctggcacatatgggactgagtccattagtttaacatcggtcactaagatagcaaggtaacttacagcattctagagcatggcacaaagagaaacatattcttaggatttttaaattattaaattccagtggtatttcaggttcaaacttattttctcctttctcagtcctaccttaattattcttattttgcaaatacctttattttgctgttttcctcctcatggttttggaagagcttctttaatttcattaaataacatgttaaatgaaagttaatggggtgaaaaataaaggaacagaattctaaattctttacatgaggataatagaatttctctctgaatggtcaatcttcatcataagccattttttgagaaattaattacagggagttttctgagaggcgctgtatgaagaaaatagcagagaatgaagtgcccgttaagtagctgactgtccacaatgggaagtactgatgcatctacatgccacaggtgcacccaaggccgtcctcatccctcacctcctgctgtccccaagccccccacaagccagtacacatgggtggagttggcacaggttgtacaagtagagatgtgtcagaagcataaggaagaggccgggcaaagtggctcatgcctgtaatctcagcactttgggaggccgaggcaggtggatcacttgaggtcaggaatttgagactaagaatgcaaaaattagctgggcatggtggctggcacctgcaggcccacctactcgggaggctgaggcaggagaattgcttgaccagggaggcagagattgcagtgagtcgagatcacaccactgcactccagcctgggcgacagagtgagactccatctcaaataaataaataaatagatataatagcttgagctttcataaaatctaagacgaagttgagggtcactttaggaatttgaaagcacagtagctaagaaatcaacatataattaaactcctaatcttaaataaatattaaaaagtgcttgccccaacctcagacagatctgaaaccattctctcctgaaaagcagggtctgtcttacctttgagtttttctctgatctataacccttcttacctcttgtcaatgtctccaaaatactgccattaataactcaccttaaaaggaccctggtgggaaaagtccccattagtaaaactgtttggtccaggcatgaaatgtgtatattccgcacagagttcggtaaattgccctaggatcaatttttctggattctagattacaagcgaaaactcttgtcgttaggttttctaatattagcattaatgctagtcgttagcagaatgcacctgcacttctgctgtgtaacaaggaacgatgctggtcttgaggaaaaatatgtttgagattccccgatttcagggatgaactagctgctttttcatggaacaccatttttacttgagagactagcaaactattgtgtgtgtgccagtttttcttgccacataaattactaccaacttaagagcttaaagcagcattttatcatttcccaattctgcaggtgaagctcagctgggccctctgagctgggtctaacactcaaggaactagcgcagctgctttcttctcttagagtcctaaggaagaatcctttttgacattcagtcaggttattggtgaagtccaattcggtggttctaggactgaggttcccatcttcttgctggctaatgaaggggccactcggggcactcagggaagcttgtggccatggacccttccctgccttgtgacccatccatcaacaatgcaacggggactgtcccaattcgaatcctcctcacactcaaaacctcttctcaggaaaaagtcccttttaagggctcatttgattaggtcagggccgctgagcaccatctccctttcttaaagtcaattgagccataagctaatcataggacagagaacacatcatattcactcaaggagggtgcattatccaagagcatagatcatgggaaactaccttaggatcctgtgtattctcttcagatattccgaaaatcatagttgggcatttagtcatatttacttaaaaatgaacagtcagctattgttacctaaacaattattagatagtctttttgccaatgatgaaattcgggttttcaagaaaatattagaattttagacaagtagtgtctgtctttgtaacttcccaaaacttaaagactttttttggtaagagcagggtgatattaacacgtgtgcttttttacttattgcacaatatctaacttatttttagatacagacactaacatttgaaagagatgcataaagtgaacccatgatttcaaaatgaccgcaacttactgctaccaaatcacggatgagtaaaaatttcattcaaaatgcaaaatagaccaacacgttttactataataaagtgcaaaaagttgacttatatggatgcagattccattttgtagctaacttttaagaaatagccatttgttaagtttaatgttgtgtgaaagaaaaatgtccactattatctaagagggatattaaaatacgcctctctttttcaactttctatctgtgtaaacacagattttgttcattgacttcaaccagaataacagagcacagcacattaaatacgaaagcagatatgagaaaccagcctctttcaccatgccagacgttaaaaagttttgcaaaaatagaaaacaatgctacctcttttactacttttttttttttattattatactttaagttttagggtacatgtgcacattgtgcaggttagttacatatgtatacatgtgccatgctggtgtgccgcacccactaactcgtcatctagcattaggtatatctcccaatgctatcccgggtttttgtttggtcaaatatacttattttcataaatatatatgttaatttctaaaggagtattgtcacttttaaatgaagtgataaacatttaaaattttctctcaatgtaattctgaatatattaagtattggtagctatataacctttaaaaaatgaagctgtttgggattttcaaccattttcaaaagggtcctaaggctgaatgatctgagcacccttcctctgggctgggagaggaattagggagggggaatgagaattggcctctgggtcactcccagtatgcaggaaggacatttaccctgggctcaaccatgagaattcagggagtccatgaaattaaataggaaaagaaatgcatttttatttacactgccttctaagtgaaaattagtattttcttctgttatgagtgtaagcaaaaagccataagaataccagcagtactttgccatcagcagaaactgtaggtattttcttatcacattaacggtgatggcagatatcagaagctttactttaaaattcagactattgtcgctattagatctgccatggtaaagaagcacatgccccactatgtacaaattctttttaaaatatgttgatgactatttcaacgcaactagctttgtttggtatcctaatattttatacagctataaacgttattctgggaagaggcccattaacctctccagacgactagaggagtgaggcaggaggttaagggccctcagcatagcggtttggaaggtgagttttcagcaaaggaggtagacacagcagatagataggaaagggactaaaggagggagctgtgccctgaaggcaaggaggtaggttcaaggaaatgaaagtgaaaagagattagtgttgctaggaaggccctcaaggtgtgggttgagaggtaaccaatgagtttggcaggtccagggccatgaagacctggacaagtgctatttcagtcatagggcaggacaaacatatccctgcatggacagggaaacaatgacaaagaacctggatgaccaggatagacatcacttgaacatttttattttttaaaaggaagcagagatttgggaccaaagctgaaggcgactgtggggccaaaggagaaataccggtgctgattttgtgggtgatatgaatgtgtatgtgtgtgtgtatgtgtatgtgggtttgtgtccctcccatgagctgcttgtattaagtagaaacagttgaggagagaggaagcctgatggcttaggagagagaaggtttcagggaaggagtgatgtccaagcaacaggatggagtgagcagtggaggacccggtctcagatgtggcaggggcagccaccactgcaatgagagagtaggcagagggccacataccaactgctgtgttgttagtgagggcagagtggaaggacttgggaacacgtgaaaaccattgatctaggaatctttcaaggactgtgactcagtatctcaacccatgtattccacttgcagtggataaaaatacatctaccattattaaacatgcccttgaaaagatggagcctactccttctttctttgatagtggcctggacctaatgactcgcaagcaatgaacagaaaaaacagtggaagtaattgtgtgtgactacggagaccgggtcactgcaagttcctgctggctctttctctcttgaagaattatgcagctctcaggaaatcaacagccatgccatgagggtactcaagcagccaccgggaatgccacctagtaagggacctgaggtccctgccaacagccatgcaggcaccgaggcgtcctgccaatctccacacgaatcagctcttggaactcagcctccgttgcctgcagccccagccagcattgactgtaaacccatgagaggctgggaaagaacagcccagctaggctgcacatcgtctcccttaaaaaatacgtgagctcagacacctttcttcattaggccaataataattccggtaatttatttgtagcaatagaactaatccaccaccatctttcaggctataatataagtctctataattagaaaggatggaatgagattggtgacaaggacaggggtcagcaggtattgaatgtgtagagccagatgggatgctttaaaccagagatgagaggccaactctgaacacctttattctcttgcatagtttgggtccagtgtttttgaatcttcatgttttcaggagaagcaggaaatctggatattcatgtgaagttccctgtgttacgagggtaggtacatcaatccttttttatgttccatcatacaggtgacatcagtctgtagttctggtttgtgagtggtacgaggtgtatatttacctatgggcccttgaataccagagggaacttgccagtccagttctcattcctgagccttattcttagcatgccctctgatggaaatgagttgtgcaaatatctaatgttttaataatcagtttgagtcactgtaaagcaatgtctccctgcccaaagatagatttcctgtcccgttaaaaaacatgaggaaatatctgtttagcatcatacacagataacctaacaattaatgactaaactctgaagaattacatttatgaatatacataccaccagtaaacactgtgaacacaaaccctcaatatttgcatttattttctcttagttactaatggtagctatccttttttctctctatataaagataatggcatttaatgttacccaacttactactatcccataataccaattatttatgatattaaacatggttaaaaagtgtttcattttaaaaccatacttagagcaatgtgaatgtttaattttaaattgtgtttattttcaaagttgcgtttgacaattatcacaagaggaaaactaacctctggaaagtaattctacatacacatacctttgaggcagtcagctcatctgcagagcctcccgcctgaacggtggcactgcagttcccataaatatacctacagagggtgccagagagctggcagccccgcccaggtaccaagtggatacctcagctcagatgggcttttcctgtctaatattctaacatgagggtgaccaatgtgtgcattaaaaatgaataaagagtaagaagctagagctctcatgcactgctggtgtgaatgtaaaatgaggcagctgtcgtgaaaaaacagtatggaagttcctcgaaaaaatactaataaaaatgagcatatgatactgcaattcgacttttgcgtacacacctgaaataatggaaagctgggattcaagtagatgtttttacactcaagtttaaaacagcattatttacaataaccaaggaggggcagaaagactgtccataaacacatgaatggataaagataatgtgatctgaccatataatcggttataatttagtcttaaaaaggaaggaaacgcaggtacatgccacagatgggtgagctttagggcagtgcgccaggtgaaatatgcctgtcacaaaaggacaaatactgtatgatttcatcgataattagatacttagagtagtcaaattcaaagagcggcagggaggagggggtatgggtaatgagagtttaatgggtgcagactttcagttttggaaatgcatggtggtggaggctacacaacagtgtgactgtattcaatgcccctgaattgtacatttgaaagggtttggctatgacagtgtccgcacccaaatctcatcttgaattgtagctcccataattcccacgtgcgatgggagggacccagtgggagataaatgaatcatgggtgctgttgcccccatactgttctcatggtagtgaataagtctcatgtgatctgatggttttacaaagggaaacccctttctcttggttcttattctctctttgccgccaccatgtaagacatccctttgctcttccttcatcttccaccatgactgtgaggcctcccagccacgtggaactgggagtccattaaacctcgttcctttatcaattacccagtattgggtatgtctttatcagcagcatgaaaacagactaatacaacatctaaacgttgtgaagatggtaaattctgtgttaggtttatcgtaacagagtagcaaataataagtaaaataataaaacttagcacttttctttcaaaataaatataaacgtaggtttgcctatgttccaagagcctttcagtggtgtgactgacttgcacattaaccaaagaaaaagggcatctgtggtagagaccaccatcctggagcagtcgtgtggggagcacagatggaacagaaggagaaagtagaaagagtgctcttgtaatcttgcaaatgatgcaagttaaaatggtgggcatggtctgtcttaagttatggagctgaactattaatacatctcaaatgtcaaatatgaggtttattcagcacattgactgataatgcccccttaatatttctaacattagttcttttactgaagcagattcatggactaaggcagggatactggcatccacgtggttttcaatctatcaccgactgcattttaaatcaataatcccaaaataatgcaaatgagtgccgttcgaatatctgcagggctgaggtggtagagtgtgatgctactgtcctctgtggggagccccgccaaaccgaccagcaaaacttctaatccaaagtctggccgtaattctccacgtgatctgaacatgtcagccagggaagtaaaggtttcgagctaaagtagacaactttcagaaaactcacttgtggaacatttaactaactcgttcatgacaagacttactgccacgcaataagcaatgccgtcttaaaaagacctcaggtcaggcacactcttccctgcctttttaatgactgacggcttgctacaggaagtgttcacctcctggcacagggctcgtgcagggcagatgctgtctgagggtgggcttcggagtgagactttgccagtctagctctgccaccactcactcgccttgggctcagttgtgctcagtcagttcttaggcacaactctctgcatgttaaaagagggatataatatccgccagtagatgaaatacatttcaagtgcttgaacatagaggcaatatgtatccccagcaagacagactgtggaacctgcccaagaggaatcgaagtgggccttgacaatgtccagaaggtatcgggtcagtaagacttcatgacaacctgctggaagccattagcagatcttagtgtggaaagacggtgaactcaacttagaggaagcgatgggggctaccagcgaagtgtttaaagatgaaactcgcctcttcttctgctaagtccctatcacttccaccaaagctcagaggattttaaaagctctcaccacaaagacataattatttcaggtgatagatatcctgatgaccatgatttcttcattctacagcatatttataaacaaggcaccttgcatattccatgtattgaagcacgtatcaaaacatcacactgtactccccaaatctacagaattattatttgccaattcaaagtaaaaaaaaaaaaaaaaaaaaaaaaaaaaaaaaaaaaaaacaaaaacagaagaacggatacataataatgtttcaaaaagttcagaggagaaaaatctttggtcgaagcgctgcaagtgtttccacaggtcctctaccttaaggctgtgattctgctctcaccccaaaagaactttcccgtttgcaaaagtaaactacttacaaggagacaatgtgatcatcctgaaggcttcaagtccttccattcccccaaaatcatgtctccaacaggtaggcagagaatgaggcttccagtttgattccccatatggttaaattcgagatgagaaaataccttgagcacatggagccccttggatgcatcatccctgactcagccattccttcatgtagataaatgaacacactgatgcattctcctcatgctcccaaaaaaatttaaggagcgattttttttttttttttgccctgtgtctgatcaccactgagctgggatagagcaaacctctaggttagcagagcaaagactgctgtctaagaaggctctcaagagatccattatcccttaattgactgatgctgatttggccccaggttagtggtagggatcacagcgaggagaggaaagtgctaccgccaatgaacagctttgcacacactatatggtttcagtgcctacatgtgcacctctcacttatgtcatcctctaaaaagcttacatttcttctgacagattgaccttcaccagcatttactaacctcaccaaaaggcaccttgtttattccattaaacagacctagaaacttattcacagttctatgcagataggaccagagttatgtgtcactcagaggtgatacccttaacctaatattttgacatgttcaaaaacaaccccattcatgttatgccagatattaggaaattatgctagaggtgataagagagagtgcttttagccactataatacgtagaccaatttgctgcttcaaagtgccatttcttgccaaaggttgcttttgtaaaaattattttagtggggaaaatttatttcaaacatacacaaaattacagataaaagtgaattgaacctacagatacccatcactcagctgtaataattatcacagctatttttcctacgtccttatacactttcttcccaatcaagtttattgtcgagcacaccccagaacataaatctatatatccataaatatttcagtatgtctgttaacacttccatcattccaaagtaaaacctcttacccattaagcagtttctccaccttcccactgtcctccttcccccagcaaacaatgacgtgcattctacattgaccagcatttatggagatacagatgcatctccacaaacagagtctctctgaatgcctctcttgaaagaaagagatggaggaatatttcattttagtggaagttcaggctaatacagggagaaatgttgcttgtcttggtaagagtgtgggattctttacctggcatggtcatgataatgactaccagttttaaccccttcaattcaatccgaaacttgcccagccactgttggacaattcatggataagtgcttgacccagtgcagccagtatggctggggtgatttgattccacccgtgaagaatctaaaataggtttttgaaagtgatatgaactttaccaaccaaggctaaaatggaaaggatgcactgaaagaagataggaattatgctcggtactgggaggtcagcaacaattgaggaaacaaagtataaatgggtcagaggcttagagcacagaatttacaggtagagagactaagatgatgagcaataccaatattaatggtaacagcattaagtgcttatgttttggacatgtgatgtttcatttactcctcaccacccatgagtgagtttccatcattatcactgctttataaatgaggaaactaaagcttagagcagttgaataatgtgaccttagtggttttggacctgaggtttgaaaccatacaatggactccaaaccctgggctctcactgaactcagcagatatttaaagaacagcagcaacattgtaagaagagcagaatgcatgctctccacattttttagacaaaaaaaatgctccattcctatgaccaaagagcctaataaaatggatgccaccagggaaaggagggccttggaggagagggctcctagcggaagccacgggcaagccctgagttcaggtcactcgtggtggttgccttgggaacagagtctttccgagaggactctatcaatttagcagtttcgcccgaggccaccctgcagggcaattactcgatacaaagctgccctctttagaaaggcttaaaatctttccgctaaaaataattttgatcaagtcatttaacctgtgtggatcacagcctcaccatagtaaaccaatgaaattttattgtcaaggactttttctagctgtacccttcaatgaaattaataatgaaccaagtcatactggaaggactcattccttaggaatagtaatttaactacaaaaaacaaaaagaaccataagctcaatagctataagaggaaaatatttgctgagactctgtataatttcttagtacattctactaaacaccctgactttatgcccaggcaacgcaccatgaaagctgcatttcagcaacccttgcctttaagacctttttggtttgtttgcttgtttgaacagagttcaatcctaaattgattttttttaagacagaaaaaaagaaaagtaaaaaatgccccagatgaactgaaccttcaagagtaacacctgataaactcaatgcttaattactaagctgaaacgtccatcccactgagtgattccgtttcacctggcctcatctcaggtatttatcgagtgattcaagactattttgaaatctgttttaaaagagatctatctatctatccatccatctatcatctatctatctatcatctatcatacaactatttatctatccattatctatctatctacttacctacctacctatctaccaacctacctacctacctacctaaagatacgtgtgccctgatcaagggaaatctgacttgggaatatgtcagccgaagtaaatgctgctgattggttttataaaagtgacacaaactttaccaacagaggctaaagtggaaaagataaagtgaaagaagttaggaattagactcagtaccaggaggccataaatacacacacacacacacacacacacacacacacacacactctctctctctcatacatacacatacatatattacacatattaatatatatacacatacacatatttatatatgcataaatatacatatgaatatatatacacatacatatatgtacaaatatatatacacagacatatatattatatatataatatatatataaaatataatatatattatctggattagatgatagaaacctgtaagaatgtacttttgatttggtgtatgtatgcactaatcttcacttattcaatgttttgctttcaacggtttcagttacccacggtcaaccgcgttctgaaaatattcaacgaaaaatttcagaaaaaaacaactcttaagttgtaagttgcgggccattcttcgagtgtgatgaaaccctgcaccgccctgctgcatcctgcctcggtcccgaatcattcctctgtccagaaggtccctgctgtttgcaccgcctgcctggagttgggagtcactcagtgcccatctcagggactggatggacgcccatggggttgtggtgtctgtgttcaagtaacccttattttacttgtacttaatgatggcaagcgggtggatacttgcatactgttagaactgtttttactttattattagttattgtttatctcatatgtgccccgtttataaattaaactttatcatgggtacaaagtacgagaaaagcatagtttatgtagggtttggtgttagccacagtttcggccatccactggggtcctgaaacttatccttcaaggataagggggggatgtctgtacgtgtgcaagggtgtgagtgtgtatatggcagtgaataaactcaggaagaaatgcaagctgtttaaaaatacaaagaatttttaagtgaacttcttatccttgagttccaatgtgctaaattaatacttaataaagatatttaattatttaaggatactaccattaccaatatactacttaaaacattgagctgatgcatggaattggaagcctgcatttcacgatgagaatgggagccttcggcttcctactcagcaccattccatgtttcatctcccagtgtctccctagtgcttccaggcggggtctgctgcatcttatttattactgatagccaagagactgatgagggctgttcgacagcatcgtagaaaaatggatttgcttctgcctggaagcattgggaacactgctcaatttaaaatacagaaactctgccaggtgcgatggctcacgcctgtaatcccagcactttgagaggctgaggtgggtggatcccttgacgtcaggagttcaagaccaacctaaccaacttggtgaaaccctgtctctactaaaaatacccaaaatagctaggcctggtggcgggcacctataatcccaactactcgggagtctgaggcaggagaattgcttgaacctgggaggcggaggtcgcagtgagccaaaactacgccactgcactccagcatgggtgacagagtgagattttgtctcaaaaaaataagtaaaatgaaatacagaaactctcctaatgtggctgcttcttctgtaatcagatctctctgctctctgcaactgggtgctgaggccccgtgacggggataccttccttctggttgctcccatgaaacttcatctaatgccgctgatgctacaatagggctgtactgaagcaattttccgtttccagttagagacataactcttcttttacttcatccaaaccctccagagtagcctctgttcttgttttgagagcaatagctcccctgtggtgtgcaaagagaggagtgaggagggaatgctgtttttgtaaaacaaaataggtgatatgaatgtggacatgggaggacacacgccagccaccacaacgatgtgaaacaggtacatttgcaaaataactcttttcaatcaccagcatttccttcagctgatacattcccaagtcatatttcccttgatcaggcacacggtaacgggcaagttgcccctggctccttaatggctttctgtctgatttggatatttagtgatattactcaacacagatccaaaacttggcttatacatcatatatggcaagataaaaaacaaacaaaacacacaaacacacacacacacaaccagattctgcaaatattgactcaagacttttaatcctggaagttgagcaactgtataatttacaaaatccttagatgattccagaatgcatctacaaaatgcaggtattaggcaaaatgttttagaagtctctgtgtcaatatattcatgtttccctgtgtattagctactgattctgtccagttacacagtaaaaagcaaattctgcctttagaaaatatgagtcagcatgacttgcttcagtgtctgacttcactactcatttaactctctccacaggtaagtctgaatctcttggtgccctggttcactcggctgagaaatgggctgccctctggagaggcttgctatcaggattaaattcatggacaacagaaactcgtttggagcaaggcctaccacacctctagcctttacaatgttgctgcagataccacacatgctccttgctaatctggccaattacactttctatcagtattcattttgaaaatatgcattgatttcctaatttatgcctagaatttttctaaatatatgacatagagttataaataaaacagacaaaaattacagcctcctaaagctttcttgctagggaaagaaaataaacagtagacaggtaaatgggtaaaatacatggttttcagtgggaataagtgcggtggattaaaaaaaatagagggaatagaaatacaaagaactacctaaagcaggtgtgaaggagattaataatataaattctacgtttccaacactgttgtatgcagtttacatacattaaatcttttcagtactcataaaaccctgtaatcgcatcacatctgcgtctaatcatattctatgtgtattaacacaatttgattctcactcaacatttgtgtgtgtgtgtatttttttgttttgttttgttttgtttttgacagggtctcactgtgtcacccaggctagagtgcagtggggcaatcacgactcactgcagcctccacctcctgggctcaggtgattctcctacctcagccttccaagaagctgagacacaggtgcaaatcaccaccatgcatggctaatgtaaaaaaaaaaatgtagcaatgtggtctcactacgtggtccaggcttgtctcgaaatcttgggctgaagtgatcctccctcctcagcttcccaaattgctgggatcactggtgtggaccacatgagtagaatatcatttccagtgtgtctaccacctgcctcaccatggctcccaggccctggctcctgcaacaccaggcaatggcagagtgaatctttctcatgccccaggtcttccatcacctgcgacctggcctgactcagcttccgcagaatggagctggggataaggacacacctgcttcacactgcctggcttcaaattcacctttaccaatcattaggtgtgtcgttttgcctcagatcctcatctgcaaagtgggagtggcataaataggccctgttttgtgaggctgctgggatgttacgtatgtctacatatgaatgggtgaaagccatgcctggcatgtagaaggtgctgtgtgcatcctactagaacattccgtgtgaagcattctgggtaaggtttctccctgagccctctcccctacctcctgtcatttcctcccaggatctgatacacaggtgacattcagcacacgactgtggttacatgattacgtccaattataaagtgctttaagcggatttgaaagtcagtgttcatttatattatagtcatgtaactacaatagtcccatattatattttaatcttaaattagatgggaacagagacaattagtttaataaaaattgcatttcctaccctaatcacaaacaatgactatcgggagaaattatcattgattttttgctttctagagataagccgattgggagtaatggcctataagtttatcttgctaaagtaaattgatgtgacttccttcaggaggcaaagacagctgaccacaaacctcacattcctaatgtgacccccctttctctatcacattcttcattgtgcaatctttatttctataatgcttttactgataaagaaatgcaaattattttagaattaaagttacagaaaaattaattgttaaatgccatcatcttgctctctgttgaaaaatttctctgttgaacattttttacttacactgttactggtttctttttaccaatctccttgcacagagtagcatatatcctcctatgtcatttaaaacactgtcaagagagatcaccctctcagttactaagctttttttaagctaccttggttgccccaacaatccacactgaccaggaaaatcaattacaatttcttgtcttcacgtttctgacttccaaattgaggcagtgatatttaattaaagattctctgaccacattcatttaagctcccatgaaatcgtctgaaatcaaaggagacaaataaaaatagccaagatggtagtatttaaaactaccaaaacataacccatttaatgttaagtcagccttatttagtctttgcccagtgagaattccctcaaactctgacttgcttgtgttctaaaggtagataattgtcaagggaaattcttaaaagaaacaactaaattacttgtaataaattgcagaagaatgcagtgacaaactaatgaagtgaaaaggggccatgtctccctttctggtgtctgtaagtttcaaacactaatgtaaatgattactatagtctctttccattagcactgtgtgggctctaacatacacttttatttactaaatacatttagtagacatgtgtaataaaaatatatgccctttgatctatacatttaataagcacagaaataaattatatgaagtagtgaattttatgctacttaaaaagcaagagagccctaacagaaaatagcgacgatcacagtggaaggaagagaagtcttagatatttgtatgtgtattttgcatatttcaatacatcgtacaatgcatacaggcattggggcctggcaaaaataactacaattgtacattcttctcataaaatatgcatggtggttgtcacaccttttatttatttcaattttgggggaaaatgacttgaagctcatatgtgcagtgaatacataatttaagttagagttttgatcctggtgatcagaaatgcaaatactggtcctgccgccaaacatgaatgcccttcccttttcagggctctgtgctcttgtcacggggatggcaaacatcctcaggtggcagcagtcaccactgaggggaccaagagaagacatgccttagacagggcttagataacagataagtctttctactgaatgcacacagacacatggaaggtgccaccctgtggtcaccaaccctaatttcaaagacaaattcagagtaacgtaaaataaaacaacctccgtcaactgggtgcactatacagataggctcacacgcgtgacaccatgtttctcttcatctaaaataggcatcaataaatgttacttattagggcattcatatttcattcatagtctcgaaatctgtaaggcctccatggtcttccctctgtccttgctgaatgcgcatatttgtatgcacaaaaaggtgtgttcaaactttagacatgatctattcagagatatatattgttatattgtaactatgtctttcttttttctgttttctagttatgttcttacatttcacctgacacaggtttaatttcaaaatagtggggatttattctataagtttacattttatttagatcagagttaattgtaagtttaaacaatgtttgcagttaaagtatctgatgcatgccggatactgtaaggaatgcaatccccactcctgtcctcaaacttttgtcccaggcattctgttctcatcctttgaaacttctgacaaagctgtagattgtctttagaaagaatacaaaattacagctagacaggatgaatctgttctagtgttctatggcaccacagtgtgactgtagttaaccacttattacacgtttacaaatagttagaagacaggatttagaatgttcccaacacagagaaataataaatgtttgaagtgatgcacccgttaattactctggtttgatcactacacatattatgtttcaaaatatctctctgtattccacaaatatgtataattattacacgtcaattgaaaaaaagggaaaactgattaaatctgggaatgcttaagtttttgaaaactaacacattaagtctctcaaaaggcctttctgtgctgaacatttacagttcatagggaaatctgttaatgtttaaattcctgtgttgtaagactgtaccacatggcataatgggtattataagttttaaactattgatccacagttatcacaaaaatagcaacagatgctacagtcagctgagatcaatggaaaaaggtaaaaaaaaattcaattttgttagtaacaaagaatgcagacattttacatttgggacaattaaaaaagcagggaagttgaagaatctccagtaaataatgctggttgcagccttcaagcaatgaggatattttctctaaaaattacagagaaactaatgccagagttcgattctccttcatgatccctatcattaaaattgtcttggtctcttctgggagtcattgaaataccaataaaattcgtagccacttacaatatgctgtttttcatagagtaaaagatgcaacaaaggtattcattttacaaaattttattttatttttctttttgagatggagtttcactcttgtcctccaggctggagtgcaatagcatgatcttggctcactgcaacccccacctcccaggttcaagtgagtctcctgcctcagcctcccaagttgctgacactgcaggcacctgccaacatgcccagcgaatttttctatttttagtacagatggggtttgaccatgttggacaggctggtctcgaactccttaactcaaatgatccgccttcctttcattgggcagcacaaatttaaagaataactgatgataaaatgcaatgctgaataagagccaaatgcctggtacagaaaaataggtagacttttgcaggagaactcagaagtgggagccatccttctgcggtaaaatactcagaggagggttcaccgatggatgtgatatacagacggaaaggagaaggatttctgccacagggaaagttatatggcacacacaggaaggaggacgagcaggggctgaggtagtgtgatttgatgctggtaaagagacaaatgtagggacctgggatgtagattttacgagatgtattggggaagaggagtcgaagcaaacaaaacaaactgcaaacgaagagtctaaaagacttggtacctagttccacaaaggaaagcaaaggaaaaagtgaaatgaagaatcactgtgtttaccttgagcatcagcttagggaggctatgcaggcaacagagtgcccagtggaggagagtatagcagagaggatgaggcagagccctactcagcttctgtgcccaggggtgggaggaaactgggatcagaagaagatagagggggccaggggtagtggctcacacctgtaaccccagcactttggaggccaaggtggacggatcacctcaggtcaggatttccagaccagcctggccaacatggtcaaactccgtctctactaaaaatacaaaaattagccaggtgtggtgataggtgcctgtgatcccagctacttggagtttgaggcaagagaatcacttgaagctgggaggtggaggttgcagtgagctgagatcgtgctattgcagtccagcccgggcaacagagcaagactccgtcttaaaaaaaaaaaaaaaaaaaaaaaaaaaacatacagaagaagaaggtagaggaggtatgactccatgcggtagagtttagtaggtcagagactaaatgtttaaagaggtttgcagcttccctttcaagaagtttgacagtgagaggggagaccgaaggggaatgtatcacaggatggcatatagggccaggttatcccatccagcttctgaagttaatcattttgtgtacctacatcatgacagagggagtagcaattttacatatttaccaagtaaaatgtacttcccatttccttttgttttacagtttttagtaggcacatttatttctatccatttatgatatgcattttttgacttcaagattaactgtttgttagaacctgaattattcagtgcaaatagtgcagacagataacttctagcaaaactgaaaagtaataaggatttctaaacttctaactgggaaattaacactacacaaaatttctcctctctgagtgcgcattcttactgagaaagaagaaaatacccagtggtggttgaatttatttgtgggaatatgcccatttctctatgaccctccatggcccttctaccctttctttctcaaatgtgctcaagtcggctttagcaaactcttgtggaccaaaggtaaaggttccaattccttaccatgtgagtcatattctggcccaaacctactttttcataattatttcccacaaatggcaaatctaattccactttttccaaagaatcttggttttttttttttttaaccctgcaaattgcctttcgaggctggaattctctccttttcttcccagcttcacactcattcagcacattcttgcctcacatcctggtgcacctggctctgctgatgaggaatcctgtccatcagtctatttgtctatccacctagtcacttctatcgcctttctgtaaagtgagtcttctatagcccaccattaaggagaagtgatcattccaatctggatgttctgtagatagatttaattctcacctagacattttattactcctaagatttcaggtaaacataacgttcatacaaatgtttatgaaatctggtatccagggagacagtccataacttacattaacatttcagtggcgaatctgacccgaatatttttcaagaactataagtaaaattgtaaactcctgcagaaagagtcagtaaatttttaattgtgctcctctatctaatgcttacaataggcctgcggtctatgatttatacatttttaaaaacatttctgatggatagttggcactgcactgaaaataaaataaacctgcctgtggacatggtgaagaaagtgacgcattgcctctgccccgggccagtagtgcttcaccctaggacgtgcccaggtccacttttccttctgctcgtcctgaaggacgtctctcccatacacctacactcagagtcagcactccagtttaatcacctgagaagcttgcataggatcagagagagagagagagagaagaaaaaaaacaaaaacaaaacgaaacgaaacaaaaacaccaacaacagcaacaacaaaaaacaaacagagaactcctcatataaggagacccaacttcttcactgtgaagagttacttctgcgtttctaaatgtgttatgactgcaatggataacagagtatttccgtgcgaatgcgctgagcagcctcatgtcgcactcatcttcttgacaggataccacgaggcacagactacacaactagtggaagcagtaaaatccacgccacccttggaacatacgcctagcacacttgtctcacttgaccgccatggtccctgtatggcagctgtgcttagctccatctcactgctggataaacaaacctttaaaggaactgagagacttgctcagtgtcatgaaggtcttcaggctccaaaagccagcatctctctactgtgctacacgactcttttcatgaatgcagagtgttctgccctttttttgtggttttattttgctcaggcattgaaatattccaggaattattcaaggaacatgaagcgaattctgcctctctggagatggctttcctggatgctggaagcaacaaacaacttgctgcttttgctctttagaaaaatagataatttgccgtccacacataaaactgcattgcgtggaatagtgtgacattaggatggtgttagaaaataataagtattatgtggagacttctgaataagtaattgatattgacttagaagactggaaaaagtttcttcaaaaagaataatggaaagaaacaagggtggttgcagggtgtgaaagaaaattaaatcttgggacctcaaactcattacgccgaagggaaaagtcaagctgggaactaggtctcgaaaaccttccttcccctttttggttcctaaatgaggtgattacaagatgaaaagctccacacttctccgtattttttcccataaagacattcctagtgagctgcaagatcgttactcccaggtgtttctgttaaaatttcaccatggcgatgtaaattgataagtttatctttacagctgccgtcactcccttgcccaccagacacaaatgcatatctgcttcctcctctaaccaatttcgtctatgttatcgtatgtaaaatccagattccctgccttttcctctgcaccatttgtctttgtcaccttacataaaaaattggagaatcactgacccagacagaggcatgaatgattatcttcccctacccccgttacatgaaaattgtgtatttctcaatatcctgccctttccccttcaatgtggagccctcacaatcctcttccgagaaggacatagacctgtctccccagcatgcatccttccctttggcaagtaaacctcctgaaatgattgagacttgtctcgtcacttttctggattgacaagggcatggaaggtctggcgggagtgggagttgaggacagggatgacgtgttcaagccgcagcaggtgtgtgcaacaggagcatgggaagtttggaatacggatcaaaagatgagtttgaaaaggcggatggggacacagcacggagagcatctactctgcctgtgataccctgtgggcttccactgattactaaacagggcacagcaggaccagatttggaacccaggttaatgaattacatgaggttttattccatagaaagattttaaccaggaaaaaagtctaggaaactagattttaactaggacttctaaactttttggaggcaaaaataaataaataaataaataaaatagatccaaagattcgtttctttattttcatgtcagactcccatgactagtttgtcaatgtaaatgtggatgactgtggtggacagcttaacatgtgcagtgtacattgtaatgcttcaagttccaaagcacatgctatttacaagcgatgcctacagacaggtagcaaataaacatgaaacgttgtctgggctatgaaatgaagagtcagtgacttacagcattagggtaatgtaggtactctcaagacttggtgtatatttctctagaatgaatgacattcttatttattttgtttcatatatctatggaactgaacattaagtctgataaatgctcatcacagatagagtaagggatggtgttcaaacatgctgagcgctttagttgagtgggcctgaagcagactgaggtttctaagggctttaatgaggacagggctgaggccttttgtagtaaagcctagagtagctggggctgggaggctcttaggattctccgggcagtgaatatttatcatctgatgcaaataattcaacatgttaacaaccattatggacatacaagctgaattgtagccctagatatgtgtcttgagaaagcaaagctcttactactttcaaaacaaatttcaaaatatctatgaaaaaccattttgaactctatcatttctctgttatattttttggggtagtaaattgtagactatgccatggtcaaaagttaactacaaggctcccctggaggagaatatgccaccttcacaacaggaaagaacatgatggtcagctctgcaagaacctggttggaatctcatgagcctttaaaaactaccactgagactgagctgaccagcaggagggaaccctctgagacatttcttcaaaattgctctgacaaagaaaggtcttacaaacaggtgagtaaatgccaacttgacgtaatctgagacagtctgaggaaaccaggttctgcacgtgtacaacaggaaactcgcccaggatctaatcatcacaattttcagtggttgccacattcatcttttgctacgcttgctcctcaaccattttggaactcatctctggattcattctgagcactccactgagactctgaagcatttgtcttttcacaaggggcatgaatccccggggaagtcaggcagctgctggagtaaggacgttaacctcctcagagtagattccttatttcattaagcaacagcttcgccattcaatttcagaagcctgattcagatcattaagagaacaagcaatgtaacctgtgcctttgaaggtttcctggtttccctacagctgtgaataatctgtggtttccccacattatcatgtaggtaattgcctggggagcagtcactacagcagctcgccaacctggtcacagcagcaggccggggggaaaggccagacttcatgaccagttggtcaatgtaaatgctgaagactttggtggacaacttcctcacatgtacagtagacacaatcatgcttaccgttccaaagcacaccgctacctacaagaggtacacacggacatttagcaaataaacatgaaacattgtctgcagatttggccaacgatattgcctgcatgagacagagaacatgaagaataagagcagctcagggctgatacgctgaaaagaatagcagtttaggactgatatgctgaaagccagaataagttcttcctccacatcacaaaactataaactgcgggaaaacaatttacgaagggattgataacctacctgaactttattcttgaagcataagaacttaaaatctaccagtcactgccaagtattaatctgttttaaatagctgagatttactggataccattgttggcccccaattatccaatgtcaaccacatttcaaagtttagagaaaggaaggatttaaagtggttttatatataacagtaaacgtttgtcatgcattaatatttcagagacacaactttaaaataaatcaatacataaaagtgcactgaattaaaattctggcatgaactcaaatgttcatgtattccattagtctgcgtgggatttttattcattaatttaacatctctgatgaataatatttcatatctttcttaaatttattctcttgtttcaacattagtaagaaattatccccaatatctactcaaaataattacaactaatatttaagtgtatttctcctatccttaccagatacccagaagctgttcagaatgaacttttacatttatgactttttaatataccgagagaaacaaaataatcatgcctgttttatcttctttgatgaaggtcaatagggtggggctaagaaattgtcatcacatggccagcccaagaggactgagtacagtgggtcaggacactggcctgtcagctttctgcctggaacaggccagtctgagaaataaagctgtgactaaattacagctatccgaaaaagttcctcctttcattaggaattttatttcataaaaataactcactatccaccacccctcaactaaaacacgttctgatgttaagtagtgggagcagtatgacaagtcggtggagaaacacagttgtaaagactgacatgaagccaagagcacagcagcctgtactcacatcctggttctgccatttgcaagctgtatgacgagagccacagcccttaatctctccatttctcgcatgagagttgaagcttctttctgttctgccatccaataaccccatgccatccaggagggattctctaggtaattttatgtggccccatttgcaagcaaattctaaacaatccatcattttctttggaagagattgttctgatcatctttgaaaacacttttttcacagaaatattatgtagacacagtattttttttttactaatggtcatccatgcgaacacatagctttgcaaattcctgtttttcatataaacaaatcatacgtttgttttttttcctttcatgaaatattgtatgtgagagtcatccatgtcgttacatgtagaggcagtttgtctctttccaagtttgtttattacttctatggttaatgaacatttaggtgattctcagtggttgacaatagcgcttgcatctcctctggacgttctctgtacctgttgtgcctagctgctcatttctgttggacacatgcctgaaatgttccttatgttcagcttgatggtaaaacagttttctaaaacggtcgtatcaattcagatttccaccaatagtgcaaaaaaaaagtcattgttttgttctttatgttttaaaatgtggaatttcaagctgtttgttttagttgctttgggctggggaggcattgagtctgaggaaggtcctcagtgtggcgagctccctcccacttcccagccctagaaaaaacccttgtcccacttttcttccgtttgtctagaagtccaccatggttctccaaggtggacgtgattatttctattttataaaacaaggtagcaagacacacaggtagaaggggtactggctaatcgtaagtacttaatgaaaagtgcagagtaagagtcagtcgcttggaacccatagatggacactttttccaaaatcttaaaacttgtgccattgagactttacaagaatcttttgttctgagagaaattaaagtagatatttaggaaaagtggttacgtgtttctgatttgaatgagttatattattaaaaactattttttttcatggaggtttagtggttttaagaattatttaaaggttataatatatttcagtaatttattttgattgaaacaatacttcatgcatccatacctacctaatagttccctcaaatacaagatagcaagggaggtccactgccatggaaacaggcaggaggcccatgtggaggtttctagacactctgcagagcagtggtccgtggaaccttgaggggaataggagcacttgatttcctccattccttccgctaaacgtaactgagcactttccaggttctagataatggttgttattatttttacactgttttaaaaggagaggcaaccatgcatgccaccagaatccaggtatactcctagatagagctctggaaactgcatttcaaatctcagaaaatgtgagcattggagaatggggaatgcatacgttttatccaaattagaattaacctgggaacatggggctttcaataactcaaaatgcctttctaataacatgaaagtcttcatttggtataaaggtcttcattttaattaaaagggaaaatcaatagttatagggaactataacctaaaaacaaactaattatttgtgtcaacacaagctttatcgccactgtcagggtttcccttgatttatgagatgaatgttccctataaaaattggaattttattacaaacacttactttcatgatgatttatcagttacagaaaatcaatgggaatttcattttatgaaaattgtaattttataaacagccgggtaaaggtgtgtaaaactggagcccaacacttagatgactatttagtagtgagggggccctcatggttcaagattaatatattttcaaaaaatttatcttgtagacactgaaaacgtctagatgatggattgtgcttacaaggcacttatttaattataattaatgatggaggcaacatataaagaatgggctcaattttcagctgatttaaagaaataatgtgtcctgcataaatcttacattcaaccacagcccaatatatacagcagatattgcaaatatattgtgggtttttcccctgcgttttctactacttttgttcacaatgtcattttaaaagtgaatagattttaagagtagcaactgtagaacagttttacttgtcaagcaaccttactactgcttctgacatgacttgatgatataattggagaggtgaaagtcaaagaagaaagtgtaagactccgagaataaagaatttggagatgaaagttaaaaatgtaagggaagagtagaaagaatattttatgttggttgtcatttatttgaccaagaaaagcaccaagttaaaaagaatatattatttgtctttgagaagttacacaattctgtccaagcatcatacgctggaaaacaaagaagtttctcatagaaagagaccaccagtgggctgatttcatataaacgaatcatacggtttatgtttttttttcctttcacgaaatattgtatgtgagagtcacccatgtcgttacatgtagaggtagtttctctctttccatgtttgtttattacttctatggttaatgaacactgaggtggttcgcggtggttgacaatggtgctcgcatctcctggggacattctctgtacctattgtgtgtagctactcatttctgttggacgcatgcctgaaatgtttcttatgttcagcttgatggtaaaacagttttctaaaacggtcatatcaattcagatttctaccaatagtgcaaaaaatatagtcattattgagttctttatgttttaaaatttggaatttcaagctgtttgttttagttgctttgggctggggaggcattgaatatgaggaaggctaggaaccacaaagggtttcttaggaattccagataatctgcaatcgtatcaatccaagtaacactgacggaatttttgttctcttacaaatgaccataaatgataaacgtgactacaataacgttaaaaagattataatatatgcgaagcataaaaatgtatgttctttttaaaatgttcttctccactttatatgtatatatatatcttatatatatcatatatatatgattcaggttaaatatacgatatatatgattcaagttgtttgacaacatttggaaagatgaaaataacacaataatgtttacattatgtaagttttcactataattattattgttgtcttattagtccccaaatatcaatcgactatgctttttttttgtttcgcaatttttgttggcacaaataatatcaggctttccttctttaatgtatttagttcagataaaaggtacaatacaatttgggcttcatgctttttaatctcggtatagacaagagggaagattcagctgaacaaatgttttccctgcttgacagaaggtttcacatttgccctctgaaggaacaaacttgatgatcttactcgcaaaaaaccaggacagccccgtgtggagggctgggtggctggcagggactctgagaagggcccatctcatcctaagctgttgctctgtctccagctgtccttaggtttgttctagaatcagcaacagcaaccatactggagcttccattccttggtaacagttctgccctctggatccagaaaaataatcgtagtgcctttctgcgtactgtgcaccatgcgccctctaagattcctcacatcctccttctgatgggtcttgtcatcttcctctctctggtccttcttcttcttcagagggtggtgtctagtactgaacctaaccttccacaggcagtctgcgtaaatgtggttttaagcaggaagtcccctgttcaatgaggaccatgtggtaatgaaaaaaaggtaacttccttgtaccgtgttgtcttggagctgaactttaaagtcagccttgaaatgtttcctaatgcattactgttaagccaggcttacctctcttgataccttcataccttttgaccgttttagaattaaatgccaaatttttgactcctctctccttatatatacaattgaagtgtgtgtgtgtgtgtgtgtgtgtgtgtatatatatatatatacacgaacacacatctacatctatatataaattatttatatatttcttatataaatataatacaataaatttaattaaatataactacatacagtttatacatataaatgtttatacttaaatatataattaagcatatattatagaatatatataaataatgtaattataatttatgcttctataatatatacaagaatgaagtgtgtataacgtacgtacagtttaattctataatgtagttgtattgtttatataatttatatactctatataatactttcattaattacatattttttttaacttttaaaatcaacgtctgatacatctaagtgattgctattttctgccaaccaatgagtttcttatatctaccatcttggagcagcttcaaagttgatattccatttttaacctttctttcaattacagatacaaatgccaagttcactgatcaggtttgagaaacaaacgcttagaaatttttctttaattcactgttgttcagttactgagagctctaggaaaagatcaatttacattttagagacaaatctgttaatcaacctaactgactataggatcagtccattggccttgtaaatattgacttatggttatgttaaatctggtacgggatggacatatccatagataaggatcactgaagagaaagtgcagacagaatttctctaccagaccacatggagtcttcctcattcaaacccacccagcctgggtgtgcacccacctcccaccgccaacacgtccatcccacctttactccattctaactacagccacagtatatggcagtcacaagataacggcagatatggggaggtatggaaaaggaggatcggcctggcctggctccaggtgaagggaaagcacattaatttcactctaataaaatttcagggcagcttctttgcaaccaaagaagatcaagctaagaaccttccggcaacatcagaaggcaatctaagatggacaatgttcctgatgaagtctaaaatatattttggcgctgggtacggtggctcacacctgtaatcccagcactttgggaggccgaggcaggcagatcatctgaggtcaggagttcaagaccagcctggccaacatggcgaaaccccatctctactaaaaatacaaaattagccgggtgtggtggtctgcacctgtattcccagctactcgggagcctgagacaggagaatcacttgagcccaggaggtggaggttgcagtgaggcaagactgcaccactgcactccagcccagacaacagagcaagactctgtccactgccacccactccccgcctggcaaaaaaaaaaaaaaaaaaaaaaaaaaaacatattttgttgaaacgaatttgcccctggattctgaggcaggaagttctgcgtacatcatgtgccccagggactgggtggcaaataaagactgctggttccgatgtgtacttctcagcaccctctgcatttcattccccgcaactgacccttgtttctctactggtcatcctgaaggaaacgatgaaagcattatggattttaaaatgtgtaagataacagatatttagaccagtttgttgaaaaattactaaaatctccagcaggagctataattagatccctttgcattctgactttcatgggaggtatttacaaactgcaaactgtctccgtgacctgctagttcctgcagcatggaggatgctgtaatttctctggcactgcagggcttggtgtcctctctggcacatggcaggtgttcagcgaatgctaccttaatggggtcaacgttctcatcgtcacaatgtggggaaagcttaggcactttgattgggaaggtccattattttcaaagtcatgttattttaatttggaaatcgaagtggaatggtttttaggagactgcttaataaactgaatagttttttgctgtgttaataaggattactcattattagaaacatacaggaaatgatacaatatgatctaggtataaaccttagaaaccagagagaaaaagaacatttcattaccaagctctgtcctaatgactacagactccccattttgctcagctgcaggaaatccagaatctttcttttaagattcattgtgtgtaaattactgaatcatgcatttatgtggtgtgaagaccttttaggattaaaagtgatattacaatactttttgtgcattttcatgcaacctatatgctatagcatgcttaacatgaatgtaaatacaatagccaaactgctgtggatatttacagattagatgcataataattaaaatcaatgataataaatagctattgattaaaacttagcaattgttccagtgtatcaagaaactatacatatcctgtatactgtgatagtgatatagctttactaataagttcccagctgtcgactatatgatttccaaagataactgtgaataaaagaattagaaaccattttcaagctatttatccaactcctaaaatttcatggctagaaaggatcaaaatatattacgctctgttttttttttttcttataagatggagcatccttaccttggaactgagcgttaaatcctttgcgtcggtggttgctgtcagaggtgaaatggagtcgtagccaattcttgctactgataactggagaggggaggttcatgccagttagcctagagaagagaaagaggaaaaaaatctcccttgtaaaccaacagagcaaatgtcctatatcaaacccgctttgaaatccgattacttaaatccttcatcttgagatgcttaaaacagaggccatgtattaattgactttgaaccttaaaacgatcaagatgattttatctttgcccaaacataaatgctaaatccctagatggaatgaatgttttcaaaaatatttgatactttcattctcctttattaatggtgaatgcaggaggaggtattcttttgatctcttagttcttttcatcaagatcttaatcacaatgaatcagaaaaaaggaaaagaaataggaaaatgataaaattctgtgtttcacaatttgaagacttagtaattccttatttatttatttatttatttatttatttatttattttgagacggagtctcactgtgtcatccaggctggagggcagtggtgcgatctcggctcactgcaagctccgcctcctgggttcaagcgattctcctcccacagcctcctgagtagctgggattacaggcatgcgccatcatgcctggctactttttatatttttactagagacaaggttttgccgtgttggccaggctggtctcgaacttgtgacctcaggtgatctgcctgccttggccttccaaagtgcttggattacaagcgtgagccacggcgcccggccacaagacttacgaattctatgtaacctgaagtagacgccaacaaactgtttctcatgcttggtaacaagctatattcccagcatcccatttgcaggactaagaacctgggcctttcctaccaaagtaaagaagaggaccatttatgagattgatgacaagaactgcaaaagagatttgaaatggaataaaattatgttttaagaaagcagtgcattcattttaaaaataagatgcaatcaatttctggttaagctgtttaaaatatccatttcactttacaacgtgcagtttagttgtcagaaacaatcatgtgttttatttctcactattgaaaaccttatgtgcttactaaggaataaaagcattccaagatattaaagctcctgcccgttagaggcgcaagggacacatttagtttttcagtggcataagcatcactggattaggatgcttctgatacaggattgcgtgctggctcgactttgtgctaggtgaagcaacataggtggatcatgtttatgaacctctgttacccattgtataaactggacacgaaaatacctgtatcaagggtcgaaagatgatagagatgcacatgtaaatgtacctgaagcacattctccatgtgctctacaagtggttgtgcactgaataattattttgcatcttggtaacaaaatctattttcaaaatgatgcttattagtgtagataatctgtaagggtttaagcaaattgcttttagcaggaacttgaactgtggtgctgcgtgtgggcctgcctgtgagcgccgcagctgcttggtaaagctgaggacctgatttctacacagacgatttcctacgaaatgggtcacctgtgtagagagcatttccctacttattctattacctggaagaagcaacaccagatgaaatacatagtcaagctttctgatgtcagggggctctattccaactctcaggtttaaaaatgtacaggatccactttaagttaaaagccaaaccttgactgtaaccaattacaacagtgtttatgccactgtttgaaataatcttctgtaagagaagtacactgctcagatttgcctctttgcttggatttatgtagtactggctggtgacagctggacacagctgactccaaggcatatttaatcacctttttttatttttctggtgagattatgttacaaattctataggccacatacttatttgcctaatacggagaatgtctaaaaaactagattcaaaaacccccagtctgtgccactcacctgtacttactgaacttacaggtactttaaaaaatcattgtggccgggcgcagtggctcacacctctaatcccagcattttgggaggccgaggcaggtggatcaagaggtcaggagatcgagaccatcatggcaacggtaaaaccctgcctctactaaaaatacaaaaaattagccgggcatggtggcgggcgcctgtagtcccagctactcgggaggctgaggcaggagaatggcgtgaacctgggaggcagagcttgcagtgagctgagatcgcgccactgcactccaccctgggcaacacactgagactccatctcaaaaaaaaaaaaaaatcattagtttctttgtatattaaaaatcaataattatttttatacacacaaatatcacatacaaaaaacgttaaattcaaacatagaaaatttaaaaactacaaacacatagatatacactgaaattaagcacagaagcaagcctaccttttccacatcagatacgatcctaatgtaaaatatatacatagctaatagtatccaaagccctcaaaatactgcactgatatttattcaatcccctgtaagtttccatttcatatggtgatagaagactatgaatacaaaagatcagcgaatgtaggaagctgcatgtacttgctaaacttttcacaaccgcaatcaatgcttgttttgttgctgctttgaacatatatattttctcactcgcattacttatgaacggttctgactgaaaaaaccaggtggaattttttttttttcttgagacagtgtcttgctctttcacgcaggctggagtgcagtggtgcaatcacagctcacagcagtctccgactcctgggctcaagccatccgcttgcctcaacctctggagtagctagagctatatgtgcacaccatatctggatagttttgtaatcttttaattttttgtagagactgggggtctcactatgttgtccagactggtcttgaactcacagcctcaagaaatcctctcacctttgcctctcagagtgctgggattacaggcgtgaaccactgtgccagcctggaattgcactttatttgcatgcctacattaataatgatcacaaataaatcccctctctaccaccacctacacccacatccactctttaccctcatctgtatttccaaatacctactcagaacaatgatagttttgtgtcagtcaacaggatatttctgtaaagggccagggagtacgtacgtatttcaggctttatgggtcacatggtctttgttggaaattgttcaactttgcaggtgtagttggcaagtagccataaaatggcagtgggtgtgttccaataacactttatttacggacactgagattttaatttttatacaatttttttgtgtcacaaaatagttactttttgattgtattttttcagtcacttaacaatgtgaaagccactcttagctgatgggccagatttggcctgcaggtactagtttgctgacccctgctctagcatatatgaagcgatttgtaaaaacagacccggtgcagtggctcacccctgtaatcccagcactttgggatgccaaggtgggtggatcacctgaggtcaagagttcaagacaagcatggccaacatggtgaaaccctgtctctacttagctgggcatggtggcaggcacaggtaatcctagataatcgggaggctgaggcaagagaattgcttgaacctgggaggcagaggttgcagtgagttgagatcacaccatcacactccagcctgggtgaaaagagcgagacttcatctcaaaaaacaaacaaacaaacaaaaaaaaccaacaacaaaaacaccgagctggaagataaacagatgatgcatagcagcctagtgtaattcaggtttaaaaaaaatgcgtaagtcctgcacaaattccttttatttttgacagtcttgctctgtcacccaggctggactgcactggcacaatctcagctcgctgcaacctctgcctcccaggttcaagtgattctcctgcctcagcctcctgagtagctgggattacaggcaccggccaccacacctggctaatttttgtatatttagtagagatgggatttcaccattttggccaggctggtctcaaactcctgacctcaggtgatccaaccccatcatcttcccagagtgctagggttacaggcgtgagccatcacactcagccttgcacagattccttttatagagaagcaagggtgagggctttagaccaattatacaatccattttccatgaagaagccattcaaatgaattgtaccccgaagtcgatttttgtacatgaatttcctgatttgaccttttgcgttaaacaaatgttcatagacttttgttgtttgtttgggaaagggggttgttccaaatgagacctggccttagaactgtgttgttattctatcgctgtctacagggccaggagctaatcttatagctctcatctgacacaaagttgatgctataaactcagttgtttcttcattacaaactacgtaatttaaaggaagatgattactgtacaaattaggtgaaattgtgaactctctaacaacttggtgtttcagttgagatttagaagaaaagaattcaactgaatggctttgtgggaggcagaatcatacctgctacagacagatccccaagccccgaggtcctgctctctggagactgtcaatgtgtcacctgacatggctcatgaggactttgcagaacaatgcgcttactgagcttgggatggggagattatactagattattgagtgggcccaatgtaatgaaaaagatccttaaagtggaagacagaggcaggaggacaaggttccaggtagaagagcctgtggacaaaggtcagagtgacgcattgagggcttcaccctcttggctgacaagaaagctgctgatacctttataactggaaacgcaaacaaacgccttttcccatagagtctccagagagcaacacagcccagctgacaccttgattgtagatgtgagatttctaatctatttactgaacataataaacacgtgttggtttaagtcattgtatttgtgttaatttgttatggtggcaagagaaagcaaatctcttgttgagatgtatacattaaatatgtatagcttttatatgtcaaccatatctccataaagtggcttaaaaagaccaaaacagaaatacggcctgttaatcagaatgatctagaatgatcctgaggaaaaggacagaaaacaaaatatggtacaatgtgacacaattcttatctattcataaccttactgaatccaggcagtttaaaccctttataaaacaaccagtgactgaagatctaccgctgttggagtgaggtttcctggaagtcttctacagctgttagccacacttcttttaggcctgctggatttggttttctaataaacaaatagtttggaaaatgaaagagattatggggcaaatggtggaaaatgggcatgaacagagacaagattcaaagtagaaacctctaaaagagaatagggtgccaggcacagtggctcacacctgtaatttcagcaatttgggaggccaaggtcagcggaccacctgaggtcaggagttcgagaccagcctgagcaatatggtgaaacaccacctctactaaaaataccaaaaaaaaaaaaaaaaaattagccagacatggtggcagactcctgtaatcgcagctactcgggaagatgagggaggagaattgtttgaacctgagaggcagaggttgcagtgacccggagattgcactgttgcactctagcctgggtgactgagagactgtctcaaaaaaaaaaaaaaaaaaaaaatgaggaacggggaaataatggtagtgatcaaccaatgtcttcccgcattaattcagagcgcactgaccattttctctcctgatgtccagaaacacaggacacacgcctggtgaaatcaaacggagcttgccaggtcagggatattggtgcttaaaaaacaagggggttgagaagtgagaaaaagagtaaaagagtaacaggctgagaaagggtcttcttaagggaattttgacatgccctatttctggagcatctcaatctaggtcaggaaacccacaaagccattcagtgggaatgttggacagctcctttagagatggcaaaaggaactggttgttcccacttttttcccctaagaataccaaattaagcaatttaaagcaatgccaaattcatttccttcagaggattcaactgggttttgcttctgctaagagttaaaataaatggaggactcatgggatccttacagttacgacgacctcctttgagcttaaatagaacaggccagtctgtttcattttctccaaataattgtaccatacattttaggattctatttataacatactcctactcattctttcatgtaacctccctcagcctcacttttctccgatgggatataagggctgaacacattgttctaacattttacagcactctgtatgtatgactcatgcatttcgcgtatgtgacttgaaaaatgaagagtcaatttatggggataattttctaaaatgcatttggaaatgctaatggttttggatatcgctttgtttgagtacttctcttacattaagccagatttcttatgtctttagaaaatcatcagagaaatgtctgggggtccctctgcagttaagtctctttaactatgatgactcagaagccagaaagcattactgctattgggagaggctttaaatgatctctgcccacagggggactaagaaatttaataaacctattacttggaggagaccagttttgtgtcaatttgggcagaaagccatataaaagatgtgctttttcttttttttttgcattttctggacatgcaatccaaatgatttgtactgtggtgtttcattatctctgttttgtcaaaattaaatagaacaacctgatcaaacagagagttcctgacatgttatgttttgaattggctgttactcacattgtaagtgaaatcatttctctcatgaacatgttttgagtttatacaactgttccaagtcttattttggacattaggaaaagcgacaatgaactctcatattgcaagaacatgaaaaacagttaaaagaaggtctatgtgtgtgtgtatacacacataaaataaacacaataatacccagacacaaatatatatgtacacacgcacatacacatatttacatagttaccaatatttctagaaatttaattcaaaagttttgtgcacacgtatatactatctggggaaaaacaaccaactatgaaacaaaataaaataaaaaaacccatatggtatatttaaaactgtaccacagaagagttttcattcaacagttctttaatcaaaacgaccatttttttttttttttttttttttgagatggagtttcaccctttcacccaggctggagtgaaatgagatgatctcagctcactgcatcctctccccaccaggttcaagccattctcctgcctcagactgctgagtatctgggattataggcacaaaccaccacacctggctaatttttgtatttttagtagagatgaggtttcaccatgttggccaggctggtctcgaacttctgatctcaggtgatccatctgcttaggcctcctaaagtgctaggattacaggcttgagcaacaatgcccagccaaaattaccactttctacaagtcatttcttccacccggagcggcactcatgattgtctctggcaaaggccttctctctccctgacaatgatttttctccctctggctctcttttttctgggagcactctctgaggcaccatcatgctccacaccagtggccataagcatccctcttggtgacatcatccactcctgcgactctagccacggcctttagctttttccttgtgccctcctatagtcaattttttaaatgaaaaaataatttctagtctcctgagccctcccactcactccagcttggctcattctgctttccagcctcttcaggtgcacatcgcccccatcccctgctttctacacccagaaacagctgacttcatgcagggcgccatgcaaagccccatgtgccctcctgactcagatcatcccatgcgctgtcccttacctggagatcagcagaaatatctgccctgcatcccacctactctgcacctgcctggtcgtttctggctctcctttaaatttcagatcatgtgttgcagtctcagggaagcctgccctgatctctaagatcaggcagctcctccttggctatgccctctcctgacacgccagacttaccctttgcagacattttcaaaatagtaatgacttggtataaggcacatggctgtgctttggtcagataggctgaggtaggatgtttatatcctctgtgactcagcgagtctgtagcacaggcgtgtaactccatttggtatcacagccatgtagccataacatgggaagcccatgacttggccctaagccgctcttgtctgtggaaggtataatcgccctgctgacgccgtacaggcacactggtgcccagagaaagagagagagccaaagctgtccgtctgcaaagatggtcggggggagccaggccacagctcggcttggtttattcccagagagagaaagagttaagctgctgaccctgaaggcaagggagagccacccacgcagccgtgtgtaaggcagctgccagagtaagcagccgagacacggtggacagtgtgaggaagctgctgatgagagctgctactgaataaaatcaactttcacctgcctacgccccacagagtgttctttctgctcatcccccaactctcttcagatctcaccatgacatttggtgtagtcttgaaccggacacttggtgatttgtatagttatttgcttaatgttagtcatttttgcgagattgaagcctgtcctattctcacggtctctctggcacgtaacagagtgctgggcatgtggtaggcactcaatgcacattggctgaataagccaaagaggtctcttcacccacactcccagagccctaggccagtcccacatcataaagtagaaatgactatatgaaaccctcgatgttatgatgccagctagggtgcttatacttcggatattttgtctcctccaaatctcatgttgacatatgattgccggtattggaggtggggccctgtgggaggtgttggtgtcatgggggcagaaccctcatgaatgaatggctggtgccttccccatggtaatgagtaagttctcactcttagtttactccagagctggttgtttaaaagagcctagcactcccccctctcctctcctttgctccccttctcaccctgtgatatacctgtgcccactctaccttctactgtgaataaaaatttcttcaggcccttaccagaagccaagcaggtgctagccccgtttggtacagcctgtggaattctgagccaaataaacctctgttttaaaaataaattacccagtctcaagtattcctatatagcactgcaaaacacactgacacaagtgcctttgtggctaaacagtgtcatagttggataaaccctgtacctttgtacagaaactagataagtgaggagataaatggtggtaggacaatgaccagggctccatattctcagaggacccaggtccctgcatgcacacataatcctgaggacactattcacatggaatgatttcctccaaagccttagacctcagcacccctgactggagatgccttatctccttatcttaataacctctatgggaatcaaaagatcccataactcacttgccctagaaacgtcctcaattcccactccccacatctgtctgtttgtcatgaagctcctcagcaggtgtttggcacacagccaccccttgtttcaggatttctggaggccacaggctctcagatgtatatttctggttgcactcaaaaagacatgactagaggcgaccaaagcagggctcagggagtgcacagcactctctcactccagggacccctcctccatttagatttgcaccgtacgcattaggtcactaagtcacatgtgttccacctgcaaagtacgcttctcgcttctcttccagctacacactgcctgtgttcccgtccaaaccctggtgtctctccttgtgctgtagggaaactctcctgagtgtacttgtgctccctgcccctctctgctctaaaccacattacataactctgatatgaaataccacaaacataatcaaacatatataaacaacgtatgagtgtgagacaccttactgggccctgaagacatgcgtgtgagtgagtagaggcacccacaatctttgagagcagagtagccctgggtgacggatgtcacacctgagacatcaccaggtggggagtacaggttgctgtgagtgtctgcaagagaggatttaaacttctcttggatggcagtttccttggagatgtgatatccacattgtgacttaccatgtgtctggctagacaggggctggggagttcattatctagagcagtaatcacctgaaaattcatggggaagctaaatcacagcactgcccttttctctttcttttttttttttttttttttattttgagagacattctcactctgttgcctaggctggagtgcaggggcaccatcttggctcagtgaaacctctgctgcctgggttcaagggattctcatgcctcagcctcccaagtagttgggattaaggtgactgccaccacacccagctcattttcgtatttttagtagagacagggtttcacatgttgaccaggctggtctcgaactcctgacctcaggtgatctgcccacttcggcctcccaaagttctgggattacaggcatgacccaccattcctggctgcactgcccttttttctaaaaatatttttcatagctttcaaacacccttaaaaagaggtcaactgtcttagtactgaagaccctttataatatgaatcgatttgtttctagcctcatttcttatcacgccctttcgtgaaccttgtgttctgcccatgtggtggcgatcactccctcgactgtctgctgtgctcctgctttcgcccttgatcctgtgcagtcaatctatgctagccccacggactcacttttgcctgtgtaaatccttcccaaatttccaaggtttttcagaagacatcccttccagagacctttctctccttgtctttaatagacttaaccactcctacctttacagcatttgtttcataggcttccctggaagttactgtgtgtcttacattattaatggttgtgtagaggtctacctcacctctgcactctgagcccactgagggcattggtgctaactcagacatcttcctcttctttgtagtattctgtatgcactaaagccttaacaagtcaattctaaatggtttctttacttttatttttgctcctaatgtaagttattaagagaagtgaaccctaagatgataaagcattaagaacagtaagagaatgctgctcttgtcctctcatgcccagtggcttcccatcagcactgcagccttgcaggtgggggcgcccagggggtgagatctggcatcctccttttgtttgccccagcatagctccagagtcctacgggtggagacaggtctcaggaatccagtggggacacaccttcaccattgaggaaggagaaagaggaggatgacagcacttgtgagagatagggtatgagagtccatctcaaacatgacagacttgagagaaggctgtaaaaatggcctggatgccagcaaatcaggcatcaggaattaacccagaggtcaggcagagaggatcatttgggagaggatgtgacaaagcccatcttcttaagcttaaggactacgtgccagggaattgctcagaactcaagcctgggaaatggctcagacagacaagtaattcgataagacagtcgagagacagtggccctgatggcatttctctgtgggtgtgtactttgggcctcctgtccacggaagggacagaggaatgaggccagcacagtggtgcgctttcttctgccggatgagagagctgtcatgccccacctggaaatctcctcacaggcctttcaatgtgggaggaccctccacgggtgacgcagatcacactggtattaaaaatcttggttgcaacaagctaatctggatccaagtcagtgacctggaaaacgaaacctccaagtgcctgtttctaacccttggctgtatccaatgtcctggtacctgggttactactgtctgtgaagacaggcctctcaggcttgccaacacgaagaaacaaacagggagacaccctttgcctcctataatacttggacatttgaaacagggagcagtcggcactggcaatggatatccatatcatattttgactatcaaaaaaggcagtgtcgccaaacacagagatctctataataaattccacgcacagtcgatactcaaagactgataataaagaaaataatttaaaaaaaaaacatggtaacaatttattttgggttcactgacaattttctcttgatattatttttagcatacatattctttaggaatatcattaaaaaacacatttttctccttaatcttgggataagaacaagtcttatcctagctcattccaagagcctgaaatgagtctaccattttcttttttctagcaaatttcttatatcacttgatagactgacgcagaccttgttcagtcagctggtaagatatccaacgagtccgacggcaacagatgcagcacggctaatgcaatcatatgggtccccaggcgaaaagaccagcagccctcaacatctgagatcatatgagctctcataactccggagctcttcagctgcttttcagcatcactgcctgcctcctgcagacccacttaaacctcactcaagtacagtagccgtggggttccgctgaggctgctgtgtctccagctggtctgtctgtgctgtgcttcttaggtcacgctgccatcgtagaaagcaagttcattccatgcacaggctctggactgaggccaaagagcagctcaggctcttttatgaaaaccagccgcctttctccccgacctgcacactctgcaatggtgtggtcattacgaacacggacagtggagtcatactgacctgggtccaaacacaaccatgtcctttcccatgtgggtgacctcaggcctttactcagccctcctaaacctcagaattgttcattgtgtgaataacgatatgtgctactgcagactgcaagctgctgctgttctctcaagcatctttttctacttcccccaacctaactaaggcttagattatgctctgatcctcactttatcccataacatccaaagctgattgctgaccttatccaaatacgagtgtgtggatctatctctcaactatgttttatatccacttgcatatatattcacgcaatgcatactgtatatgatatatggtatacaagtaatacctatatattatgtatattatacagtgtatgtctacatatactttgcgttaagagaagtgaaccttaagatgataaaacattaatgacactcagagaacagtgctctcatcttctcacgtacacgggcttccaccagcactgcagccttgcgggtggaaatgcccagtgggtcagataaataaatacgtctatttatttatatatcatggtaaaaagttaaaaagtttcccaacttcttagcttttttccactttacattaatgatgtgaacattacacgtcatgggatgctgaacttttaaatatttcatatgtctttgcagttccaaactccatgaatgcaccaggtatacaaaacagaatcaatctttgaccccgagtatagacagctacggtccatatgatttagagtcatatatttaaagacaggccaaaatgtgtgtcttcaaagatagcagagagggggtggacagtaaggtaggagaactaaagcccagaaattaagggaatctttaggaagagtggttcctggcatagacaaccatacagtggccaatggcaacaaggcggagacgtattcccgggccaagtgaatatcatgattgagctaggtggttggttcaccttcccactcagtgaataatccaacctaactgtggaagctcatcttcaatatgattgggaaattccaaacacccagcctttaaggagtaacattcctttagatcaatccatgtttataaatgttttaaattgattactgtaaccagaaaatatatttccaacatatttttttctgaaaatttctagtttatgccataaacaagaatataaaatagcatgagacaatttataagaaagtccaaatggctcagacactgctaaacagaaacaagagtactttaagttcaacacagagtgtaacattaaatagaagcaggaattgaccatattttattttcacttgctccagaagctcagaacttttaagtgttgtgttattgctcctttccagccagtctagcaaagttatgtaatttctttattaacacgcaaaccaaacggatgtatcccacattattgacacactctcagaaatcgtaaggcttgtcctaagttttgctggtaacttgctaatccattacttccttggtggatagtctaaaagaaaaaatgcacaggctctaggaaatgtccatcctagagcaccacttctttgaaggagggtctacttagcactcactgcttttcaagaatctgctgtgttccgatggaaggtgaatggaacaggaaaggcctggcggattcccgcacagcaggcccacagcacacctggggagggcgttagttgcttttggacaggcaggtgtgtttggttagaaagtcagtcaggaaaagtcagagttgagcaaactaattaaagagatgacttttccttattagttactatacagttaaattgattaaaagatgaaaacttacaatttccccttgccatgattttacaagcttttaatgttcacagacatgttggtgacacctacaacactcgaaggcaatttgatcatcaccatgattcttccatatatatcagtaacaaactatagctaaatagtggtctttagttaaaatcattttgagaaaaattgcaaatatgttaaaagaaagttgtaccaaattagataacaatatccattaaatactatgttaaaaagcattcaatgacacaaaagaatatgtcagatacatccaattccagtgtaaagtgacaggctgaactcattgtttttcttccacagttgttgagaaaatagaggataaaaaaataagaaaaaatataatatcattaaaattagtgacaaaaatacacctagttttctatgtgctttcctttacagatatgtacacgcagatataaaagtgaagtatctatttatacatcatttaaaatccacttttttccattaagagaatgttatagctctttgtatatctatatatatatgatgtgtgaattctgtgaactattccattgagtgaacataccattacttatttaaccaatgtcctgctatggcaatttggtattatttctcacagtctcataagttttatagcacatcaccttacgatgcatgtgtgttgaatcagcacttttatttcacaggatggactcctagaagaaaaacgtatgtgtcagaagggatgtagctcttcaggacttttgagaaatgcctattgcaatattgctctttacaaaaaataggctttgggaagaagcctttgaaaggcactctgtgaattcatacagtgacctgcctttttcttcctttttttagatccggccaattttctacctttgctgtgattcctgatcagggaaggcttgcgtctctatttccagattactcccttctttccatcagagcgattggcacagctgtctccagcaggagactaaaggctacctgcagccctggcctatgccacactcatacaggtccctctcccatgattttgaaacatttctacacatggcttctttccttggtgcaagaaaatactaggcaactgggcacagtgtctcatgcctgtaatcccaacactttgggaggccgagggcgggggtggatcacaagatcaggagttcaagaccagcctgtcctatgtggtgaaaccccgtctctactaaaaatacaaaaattagccaggcacggtggtgcgtgcctgtaattccagctactcgagaggctgaggcagaagattctcttgaacccaagaggcagagattgcagtgagccaagatcacaccactgcaccccagcctgggcaacaaagtgagactccatctcaaaaaataaataaataaaaagtaaagaaagaacataataggaacattaagaggcctgtcgcacatgcagaacggccataaatgaagggaagaagggtctgaaaggaaaattgtttttagtgctttttcccatcatgactgactgtcgccccaacaccttgtgatctaatttcatgtcactgtaaccatgatggtagctctctttcccttccattgcctactccattccccgccaaacccatacttaattgcagtttttctttatactctctcaaccattatatatttagcagctgacctaagaaaagataaaggaggaaaaacaaatggtcctgtagctcatattttttagtctcatagcattttgcaggattaaattaatcattttcagatagcttggtgaatctccgaattcaataggaggtaagcagaaattgcccagtgcatgttaatttggacagtttctctctctctctctctgtcagtgtgtctgtgtgtgtgtctgcgtgcgtgtgtgtgtttcatttgcatgtctgtggtggacaatagtcttgggggtattgtattctcaggatcttgaaaaactgtatccaaattgtgaacaaaaaataaaacatttcaacacactggaattatgacttggtgcactttggggaaaaacgatgactactctttttggggccagctactttggggttttgaaatcgtgtttggctccgtgagccactcttgctttgaggttaggtccagaggctgcacctgctggtgcttctggaagccttgcttactctcagggataacagacaaagaagaacgcttagaaattcagacggcattgcttcacactctgcaaaaagagtttacaaaggagagatttcattcaaaatgctttttgcagatgatagcaagttcttctctcagttgctggtgggggggcaagcagggccaggccaattctcaagctctcgaacacacaacagtttggagcttctgctcatttgggtgactggatagcatcaccattgcagaaacacagccctagagacctggagagcctcaggggcagggagtcaggcagcatcaagttggagaaaggtgacagaagccagtgctgaatcacccccaggaagcaaaacacaggaggaagagaacggagaggcccctaaagacctcgaggtaaaagcagacaaaacgcaagattcaatgacattgactgtgtgtgttcaaatgacagcatcatgctctctccattgcaggaaagaactctgggaaccctttactatgaggcagaatgatccgttcaatacattctcactccttgtccttgctttgcccacttttgaatctgccacagtcctgatctgacccagatatgagcaggagaaaaatagcccacaggcaactcaacaagccgtgtaatgtctactggcattcagcaattacagcatttatccaattctgggctggtgagaatccataccctcctttgaaatggatctaaagaggagcttctagtgcgagcatctgagtctgccattatgctaccaatccaggcggttgatattagggtgattttgtgtgagtgctctaaactgtaaatgaacacctccttttctccttgaattctcagaaagggcaacatatatatatatatatatatatacacacacacacacacacacacacacatataatacacacacatatttatatatagatatatacatatatttagacatacatatgtacatatatttagacatacatatgtacatatatttagacatacatatgtacatatatttagacatacatatatacatatatttatatatacatatatacatatattcatatatttatatatacacatatatacatatatttatatatacacatatatacatacatttatatatacacatatatatacatatatacacatatatatacatatatacacatatatacatatatacacatatatacatatatacacatatatacatatatacacatatatacatatatacatatatatacatatatacacatatatttatatacatatatacacatatatttatatacatatatacacatatatttatatacatatatacatatatacatacatttatatatacatatatacatatatatacaaatatatacacacacacatatatatatatacacacacatatcaaacataccttcattcagcaaatattgaacgaatgtctggtctataaagcaccatgacagccaactggaagtctgtgtttaagccatcttacagcacctcccaaccccctcctctgcaccacatccttagtgcattcagggtgacaatgaaaatatcacagatgagggctgataaaagacatgtttatggctcacagttctggggtctggaggttcactatcaaggtgccagtggatcccacttctgggaaggactggattcctgattcagaggcaggacctcctccctgtaccttcccatgacagaagggaagaagggagctctctggggcctcttctataaggacactaatcacactcacgagggctctgtcctcacaacctcatctcttcgccaagtctccaccttctaatagcattaggatttcaacatgaactctagggggacactgacatttagacgatggcatgtactcacataatctgtcaccaaagtgtgaaactagcttgtgttttagattctccatgcataatttggggatataataggtttggggagagctggtaggatggggtcttgccctgtcacccaggctggagtgcagtggtgcactctcagctcactgtagcctcgactacagtgaaggctcaagtggttctcccacctcagcctccagagtagctgggacgacagtcatgcaccactatgcctggctaattattgtattttttgtagagattgggtctcaccgtgtttcccaggctggtcttgaactcctggactcaagtgatcctcccaccttggcctcccaaactgctgaaattacaggcatgagccaccacacccgtcctataataggtatttagtgaagacaaagtaagtccagtgtaaactatttggcagttttattcaattttggccttattctctatttgctgacttacagcaacagcatcttaattgagttcccaccttcaaattgatgatgaggagggcaagcatgatgggcggtgacactaacccagaataaatatccagaataaatatcattcaagtggcaggcccatctacatgcttcaacaagtcgttttcactcactttcccccacattgtatttattttgatcattactatgttgctgaggaaaatgcaaaccaataaacaaactggggacctgtgaggttgagtaatttgcatgacattgcacagctaacaggagcctgtgcctggattaaccctgcatctatttgctcttaattcttttacttacacagttgctgcgctatcctacctatctttcattcttgggcttttgctattttcctaaaatacaggctgagtcatgcagcttcttgtctaaatatgtccgcaacccattccctcttaggtttgagcataaatttacgctgcacaaagtgttatctaaagccttttgtgacctgcaccgcctgacccttcaaccttataattttctcttatccaacaacttttggctcaaatgccacttgctctgtaaattcttacagattgctgcaatcagaattgaattccaatgtgttcccagagcatctgggtttcagtagagtacacagtgcctgaggtgttatcatatggcggttgtttggatgtctgtcatctccccgggatgcaaaacacaagtttttcaaagatgccgtcagcctgctttccaccatgatatctccatgctgcctaatgtgtgctttgttgcctggctcataggacagagagacggttaaataaataaatagaaagatgctgaatacatgaattggtattaatctttcattcccctccttagtggacagaacgtcatgtcttcctgcttttctctgttaatcttcagttgggaacctgtttcaaattctcactatctttgttgaactgtggacaacctagctggagaccagtgaaaaaatcagtttgactaatgctaagtgcaaaggaataacttcacgatttctgctctcaaattttggtgaaaggatttctatttactattctaatgagtacaatatggatgacacagtgtccgtttttaagccatgactgtgctgccccgtcattctcaagggatacattccaagactaccagtggatgcctgaaaccacacagagtgctgagcccatatgtacacaatgtcttttcaatatggtaaccaagaaggctactgactgaccagcgagacgggaaacaggtagcatatacacagcaatgcactggacacaggggcgattcccactcccggcaggaccaagcaggatacaggagatttcatcatgttactcagaatagcatacaatttaaaacttacgaattgtttgtttctggaattttctatttaatgtttttagactgctgttgaccgtaggtaactgaaactgcagataaggaggaactactgtatttctttatttataccaaacttaagtccaaaaaagaattttgaaaggtttagataaaactttgcaaaacaagttagaaatgaattgtatgttaaacattggaagatttaaagacagtgaaaaataagtgaacagaagatgaatccaggagtgaagttatgcaggcaatgtatcctacgccttcacctctgaaccatctagcagacacagcatagcaggtaacaggcccaggtacctgactcaaattacacagcaattaaaaacaagtactttggggagggggcaaaaacaatcatttatcaatgatactcatgaaaaggacacggggtgaagttatgaataacatttccaataggatcctaatattaaaagcagggagaacttttacaagagcgcaacttcaaatgatctccagtgtggactcatgtgctcttgtcagtaaagttcgtaaattgttgggactcatgtgctcctgttcagtaaaagtcatagattgtcggggagagagcccaacacagtcactgaaataagttctagttcctaaatgatgcacgcaaacacacagttcaaatgatatgaactataaacttgttttactgccttaatctacaaaaggtccacgaagcattgctgggtgctgatgtcatcatggggtccattgctttccgccaacgcgcagggttgttactgacctaggatgggtcctgagacctctctcccttgcgccacatgtggcttctcaatgagctcctccagtctcatggatgtgaatgccacctatatgctgatgatgccaaattcatgtcatcagcccaggcttcctcctcagagcttcagaccctgatccaaatttccccttgactctctattccatgtgctggagccacctcagaacccatacacctaccttgtccatacaaatctactctttccccatcctcccccatccttccttccttcttcttacctgcacacactctgctcatctgcacatcatacggatcctaccttcagaacagatccatgtctgaccatctcagcaccggagggtgccctgtgctcatccggatggaggtcacagcctccctgcttctatcctccctgctccattctattctcagaacactgtccagaggggtcacatacaacccaaattagatcacattgcaccttgaagcgacactctccaggggtcacctgtctcactgagagtaaagccagactctaaagaggcgctgcaagggctgacaccttctcactcctgtccttctctaatctcctgtctggccacattctactcacacacctagctgtggccacacacacatttcctgctctctcttaaacaccctggggccttggaacttgctgtgccctctgcatagaatgccagatattctcaaaggtgactcaccttcttcctacgggacttttgttaaatctcattgacattgtagactccatatccagccatcaccacctccttctttccctccttcccaccaaggcacttgccattacctgatttcatacagatggctacctggagagatgatagatacattaggtagatgacagataaagataggcagaaaaaagatacagagatgatagatgagcagtgatagatagtgacatatagacgagatatatatatatatatacagatgacagatcatacatagaatgacagatacagacaaagatagctgatagatataactttgtattttttgcagagacggggtctcaccatgttgcccagcctggtctcaactcttgatctcaagtgattctcctacctgggcctcccatagtgctgggattacatgcatgaccccccacatctgaccttaaatgctggaggatttaaagacaatggaaatctgtctatatctgtttacatctatcatgcttcctactatctatctatcatctgtctatattagctatctatacctacacacacacacacacacacacacacacacacacacacatcatatatatatgtatgtgtgtctgttacttgttatattatgtttaaaatctgccttctcctatagaacatgagctccttaagggcaggggtttgtctgcttgatttctgcttggtgcacagtccacagtcagtaaatatttgttggacaaatgactgataatcctactcacacagtgctccagacagcagtgcctccagatgagctaactgctgcaggatacttgcatggccccctccactgctcttgcacctggggcatcctgtcaggcctcaggcaggcttcaaagggagcagtgctcattctggtgtcctgctactctaagagatgatgggctgaggatgctctgagcaccataaaatcctacaggacggagggctttctcctccaggctccctctagtccacaggagacaagctgccatacggaagcagtctcagaatgagatgcctcccccaccagcatcccaaccagcaacaagaactcctccaaggagcctccttgaagtgcagagtctcaggacccacgccagacctgcggcctccttcagatgcagagtctcaggccacactccagacctgcagcctccttgaagtgcagagtctcagttcccactccagacccacagcctccttgaagcgcagagtctcagttcccactccagacccgcagcctccttgaagtgcagagtctcagttcccactccagacccgcagtctccttgaagcgcagagtctcagttcccactccagacccgcagcctccttgaagggcagagtctcagttcccactccagacctgcagcctccttgaagtgcagagtctcagtacccactccagacctgcagcctaagaaactctggctgtctggctgtctgtgcttaacaggctgtccacgtccctccaggggaaactggagtttgagagctgctggcccagagcattatcttgagaaagactttgagactcagtttggagtcagtggaaaaatgtgtcaggatagattagaggcgtcagcagggggcagggacgggatcctggccgtttgtcctttagaggtctgtggaactgactattttctgctctgacatttgctatcacattctatttgcctgtcagtagtttaccatttaaaagggtatctttctcctgttacattttccccaattagggaaacctgtgtaatcaccagctgtctggaatcatttcggtaagaagaccgggggcagaaacaaataaataaaaagattcaacacttaaatgatctctttccacttccagccatcccaaggtgccctcgccttacaagggttcctgtcttacggtagtcccattgcccccatccctaccttctacaagaacgctgcccgtgtgcctgtgcacgctcttgcctggggtttattttctgagattctctagcagaaaagagcatcagtgccctctcctgtctctgttctgcacctctccttcctgcctccaacctttctccaggttgtttctggaccagagcttcctgcagtttcagagctggccaaagatcatcttccgagcaccgcttcctttctgcagggcctttggaaatcaggttacaaataattgcttgtgattgggtatcatggagccttgtttcatgctccgaacacttttctcctgactgctgtacaagtttattattcctcattgaatactcagttgagaaaacatgctgcttgcaggcatttggacaaaaagtaggacaggagttcccggatcaacaacaatctctcaaaaatgctgtttctgggaggacaatcagccttggcttgtgttcttttcatttgcagcactttttctaggctcagatcagctcagagacaccagaatatttgcatgatcaacgttttcataacaaattaccattcctgttctcctctaaatggaatgtaggttaaaagactcctaatgtctatttttcagataaataaaatattttcactatgcgtgcatacttgtgtgtgtgtgtgtgtgtgtgtgtgtgtgtgtgtatgtgcagtatttgagagggtgaataagacagaactcactgtatgccttctagaaggtgaggactagcaagggtattatctgtttgcttgagcttttatgaaactaggcttgaacttttctattgatttttagagatttcataattttaaagtagtactgtagctacaaattgtaatgacccaagatgaagaaggggcttcagaaaccctgtaatcgatgagcactacgtaggagcatcaagaaagatcgtttaagttgtcattttaaaattttagacatcttaaaacaatccttttatagtattcactgatttcatcaaatatgtgatggaaaattactctgctaaatgagccatgcaaattagcagtgaattatgctcaaatatccaaaagcaattatgctgctgaataaccgggtattttaataaaatatggataatgacagcgttaatattttaggttacatttatgcaatgatatgacatttaaaatatagaaaaccagatacaacactatctagcgcatattttatatctgcagaacataaaattatatttaagttatttgaaagagatcccaggtcctcatgctccttccagaagattaacatccagaaatattgagctgagacatatttaatagggacaggaaaaatagttgtttaaggtgttcttgaatattttgaaaatttagtttcatttatttttttctctcatggcctgtctcccagatccactgcttgtcttaacctttaaattgctgaaaactaagaaagcttaaatcaaccaaaagaatgtgaacttccaagctccttttcctaaatacaaacatgttcctggtattcacactctacttctacttttgtgagaaacattctttaaaattctttaaaatccttttactgtaccagtcggtgttgcattagaaggcttgcgctgatataaacctgtgccatcggggtgaaacatagtatgcacaaatccaatatgacaggttaaaagttaaaagcatcctttatctccctctgtaagtacactggcattaatcaaatcagcattgtctggttcttccatgctcagaaatactacagaagaggctgagcaattagttcgtattccgcaaatgagtcaactgaaataacagttgttcgttagaatagaatttggaagcattgcaaacaatcaagaggcggcctggtccttaattatcgccttttcagcacacattatcaacactgctgactcactagtaagagtggatttcacaactttaatggttcaaaattacatcctgaatcgagtatcagtaaccattccatcaagtcaatttttgtggtactactgaattggatgggtaatgagcttcaacaaactactattttcaaattcacaaatactaaagtgcatctaataattcactacaactgtcatcaaactgggcctgctcccagctcctggggttgtaatcaagcccctcacctgtgcaaaccgcttcagttgtcggcagaaagagcccagcctggtgagaaatgcacagatgctttccacataaagcccatttaatctcttgggtgacattcttatacacagattcatctaaaagaaagtaattcaatcagctggccctagtgctttgccatagaacaatttcctcaataattttctctgcttattggatattttgagatttgcagagtgtggaaggggtttaggtaacactggagaatttaggtaagaccatggctttctaaatgtaaaaataaagctctaaagatatctgtcttcatgatctgaaaatatctgtgacattttgtgtgactccttggaataaagtatttcgtaggggaaactgaaatctaagcaaagtaaagcagcaaatagttgaaagcctgttatgatcatggcactgcaaactgtttcaagaagccaaaaacaccttcagctttggagttcatgatcaaggttgtccaaacaagacaaagattggtgattatttaactcacagtacaaagtgataattggagcaaaatttaaaaaattgcacctgttcaattttgtgaatcagaatgtgcactaccacagagtacatgccgagagaatatggtatgaatatacaatattcatacatgtctttgttcttttcattctttactcattgaacacggagtctagggtcaggtcaagcgcattctatagagttaatgcaagcttgtgctgtgaggccaggtggactgggagcagcacagtctggggggtttcctctcagagaatacgggttaagggagctgctgatagttgcaccacgtggtgcccctgagttaggtgtgcgattgtggacatggatatatggtctatctgcttacacactgctactcgcttttgaaaagaactctccaattatcagtgtactctgtcccacagtctcacataccatcaagaaaccctatagttgatgattgtccctgtgatgtgaatggcaggtgcctaggtttccatcctggactccagcctacggaggttctagggtgtccccatgtgagggggccaatattgcccctgacaatctgatagagacaacagagggcttagaaatgctgaataaatgtttccttttaaaaaagttatgactttttatgattttgctctctatacttcctagattcatttgttcaatggcattttcccgctattttttttcacttaaattcattttctaattttggtagacccatttaataagaactataatctcacatgccaactccattaaaaaaggagtatgtggtaagagaagggatgatgatactgaaagacattttgattttttaagggataatttaagagtatctctctattattattctgtccacttaatacttggaaggagagtttgataaaataaacaataaaatttgagagccatgaagaatgtaggggtcatataatttctttttttctcatttaaaagagaaaacaaacgaagtcaaagaagttcatgtcacatgaaaagcaaattcacggtgcggcataggacagaatctatgtcagtcaccaggatgttagttttgtgcttgctttgtttaatgatactcattgacttgcttatatatttccatgctaaccatacttgtatgatactgtggccctataggaaaatgttcaaaaagggaactccggcaagtcaatctttaacctgaataatcacgataaactaaaaaatagactataaataggctgttcaacaaccctgaattcaggacagcagtaatgacgcataacatgtatagataatctaataaaatcaagtgctttttaaaaaggaggctgggggagggatagcatgaggagaaatacctaaggtaaatgatgagttgatgggcgcagcaaaccaacatggcacatgtaatcctatgtaacaaacctgcacgttgtgcacatgtaccctagaacttaaagtgtaatttaaaaaatgctatatattctcagagtcaacaatgtttgagaacaagctaatagtttttggctaggttcaaggagctgggtgttggtgatactgaattataagaacagtatgaatagagatctaaataaactttaggaattaaagataacaaatgattttataagaggtttttctagcatgaacacttatggagcgactttcttgccctagctcgcctgggaatactataccgtgagccattaccaaaaaataaataaataaataaaactgtggttaaaaatacatggcaagagatctagcctctaaaccaaattgtaggtacaggattgttagctataagcaaaattaagcacaacgtcctatagcacatcgcaagcacgcgttcatcttctgtactgacacttcctactgttgaaagcaagtccccatctccccatcccgtaacccccagcctccaccatcctcccttctcgggatttatccagaaggagattatttttgacaacttaagtctcaacatctttccacctgttctatttgttcaatcaccattctttcttgttcctggatagcagtgcatggtcaggccgatactgtgtaggtgctcccggaaaaactggttttttgcaaaactcaccattagaaatactgggatggatgggaaacacagtgcagatggcaggtttttcaagtccgtacaactctgtgagcaaagcaccaggaagcagtcacatgcccctggggtgacccacggctggcacagtcaggcggccctgggcggccctatgctgatggcaggtcgggagcacagaagcattggcgggctgtgaggcggccctgcagtgctgaggaggggaaaggacctgaatcctgtgctgagggtgctgcccctaaggtgggcacaggaggaagcaccacctggcacaggtgagagagttggacacagtagcaaaggcctgagaggaagccctggatgcagctggttcttctgcatgtccataaaacatggttgaagcaccctgctgctggttcagcagtcaaacggaggctcccctcccctttgctcctgaaaggtctcattcttactcctgctattcagatccccctttgcatataaggggaaaagaaagtcgcataggagacactgaggcttccatattgtaggacagcattttcccacttaccaattaatattgatggatgactgttttcacctcaggagcacatgaactagactcggccatggttgtggtgcaggctggagctgggctgcagtttgaataccccagctctgcgatttacctattacctgcccttgggcaaattacttcctcttctggtgcctgacctttcttatttgcaaaatgtttatcatcgtacaacatgcctgacagcactgttgtgaagattgaaatagtaaattcatttaaaatgcttcggaaaacattagtgtgtttggacaataataattacaaattctttttcctctctctttctctctctcatgcatacatatagtagacatgtaagtgtcacaccttgggaaaggggtgggtacccaataaataacaaattattttttaaaaggatgtgtaaataaatgtccaacacaggaccttgctagattactaaatttctcagataaataatattaaatatatactttctaatatctcacttctaaaattaaaagttgttctattgaaaaaatggagaaaacaatgagaaatcacacgattcttcagcccagaaataactgctgttagtattatgctgtttggcctttcagtttcttaaagagatatataagttcctgattttaaggtgaacttctagggatgggcacttatttttggacttgctagaatcctcaatttctaacacaccaactggtccctcatggtcataaaatgaatatttaaatttctaatttattaagatgcttcaatatatgctttagcaaagaacagaaaaatgaataaatcaataaatagaaatctgtttggtttggaaataagggatattgtcagcaaattttcaaatattcctggaaatatgctattattctataaacaaatggtggcagacaccaatgcatgactaagtaaaataagatacaattagcaattccactcatatttacatcatgttgcatatcacaattgcttgcaccatttccgctgattttcaactcatccaatgaaatcatcacaatactgatgttaacatttgcttaaaattgtactttacaaacatcatttttgtggtcaaaacaagtttcctgttgagctaaaatatactgctgtagaatttaattttatcattctggtaaaatgtctctcatgtcagattctctagctaaacagttataagtagagggagggaatagagatagaaaaactgcccatctcacccctcaatagcatagtggactttgggtcaagattgactgaatttgaatcctggtcctacctctgtgatgttgggtaagttctttaacttctcttggccttagtgcctgtctgcatgatggagatgatgactactgaattaaagagttgttatgaagaatcaatccatcacagtttgtgaaatgctcagaagagtgtctgtttcaaagcaagcacgacagaagcatttataaaataaatgatgaaacttcaggctgcggaaaataaatgccccgggcaaggcctcagtcagcagtggaaccatttcttttttcattccacacctggccatcaagggtctgttctggtgagaggtcaggctaagcagctgggacccagcaatgccaagatcagcaatgggccatgccctcctaaggcttgtactctagtgttggaaaatacattaacggcagtcaaacacctaggtgtacttccacaaacacaatcagggcttgaagggagaggtaagcggtgctaagaacacttaattggatcatttgatctcatttataagatgttagaagcaagttaccatcgagtgtttattgaaggaagagttggcatcgccctgagggtgagtgtgggctgtgtgcatggaggagccacgtgctaccaagaagtgagaggcccagggtgcggggagccaggagctaggaagcctatggtgccccaggaacctggaagagtaggtaggtccaggctgcggaagagctatgttgaagagcttcttccttattcctgagggctttgggaagtagagcaattaaagagggatatgtcatgtttgtgtctaaacattaacaagatttctctgtacaccattcttggagccgaggaaatggaaggcagacaattgggttagaagctctgcagttttccccaggagacctgagtacttaggctgggctggtgggcattggggtgaagaaaattagaaggacggaagaagtgatgtttgggaggtgagaatgagcaggcctcattgaaagactgggtgtgaggcgtgtagtttgtgaatcaaatagaggtgaggctgcttagcaaaacaggacacagaggagcacctggtttggggccagattgggacatgagatctcccctgttattttgggcacgttgggatcaaggtgtcgctaagacattgtcgggagatgtcaaggcaagagtggatacatgggcatggaggttagaagagacctgagggtggagacaaaaatcctctgtctgttggatggagggtcactgagaccacgggcttgggtgacctcatttagggagatactagagtgagaagaagaggatcgaacaagagtttgggggaccacaaaagtacgagagaaagcatctgtaaagccataaataaggggaagcaggaggaatggtgacagatagtgtcagacaacctaggagtgggtgagagccaagaatatcacagctcccgagtaatcatgcagactgaggactttacaacggcctaggatggacaggaaaatcgctgttgggctctctcagcaaagcagttgcttaaatctagcatcttagttcactcgagatgctatgataaaatactacagactttgtggcttaaacgaaaaccatgtatttctcactgtctagagggtggaagcccatgatcaaggctctgatgagaactttctttcaagctcacagagggctatcttccccttgcgtcctcaggtggtagagagagaagaaggaaacagaatctctactggctcttgttataaaggcactaatcacattatgagggccacaccctcctgacctaaaagccccacctcctaatactagcacctttaggatgaggatttcaacccaggaatttggatggacaccggcattcaatcctcatcatctagattagatgagggcatggaagctgagggtcaggatctgaagtctaacttaagtaacttctatgtgtgaagtgtcatatttattctgagtttagagtgtgtttacagagggttaaaccaagctttatggtaacaacataactcaagaggaagggtagtcaaaacatattctgaacatgtaatcaggtagctttcactttctagaaaggaaaaaatgtccagaattttgtattcctatgctgaggaaaatgaaaaacaacaacaaaaaaagaatttgaaaaaacttgtgagttgtgaaaaaccataatcaattttagaaaattgatttcatggatatttaaattggaaagctatagagaaaacagttcaatgttgatgccattttgcttgcaaaatcaattaagtaagcagataaccaggattctcctgttttgtgggaaattcatgaatttcaattcattttctaaatgatatacaataattcatgtgaaaaacaaagtagtgattaatcaaaaaaatgacagcttatcagaagaacctaacagcaattaagaaaatattcatatccatgaataggtaagaagatacagattttccaggtaccttaattaaagatgtagttgctacaacagttaattctgtataagtatttttattccaaggagaaataaggcagcttggtaatataatttagtattgtttacaaattattgtaagttttcacacaactagaaatttacattacatttgtaagaaaaacatagaccctgtatggggaagttaagaagtgttataatacaagctaggaactggcactttttagtactttaaatgtgctggaataagaaatcagtgtcctatcttgcaaagcaagaaaagttctatcacaaaatagtataagtatgagagagtgttactctattttgccagattaaatctctgtagttgtgaggggaaggagatgggcagaaatccttgcatgggctcctaatgctcttgaataattgggagctgtgagttttagaccaagagtaaaaaagaggtgtctttggctagagtcttaacctcacacactggctcaaaaagcctctccatccagtgagtgttctttgggaagacttgcaacgcttagttctaaaattttctttaaaatattctcaggacttggagatgaaatcatttgtaaaacaagggattcatgtgatactacataattacaaattacagatagttggatcacaggatttaacaggcatagacctgcatttaaacaagatggagctaaacatcagttttctttcttaaggaactttttcatagcattttagtaaaatgcataataaattaagggatgggctttaggtaccctgaggtgtgcagcccatgcctccctgtgcccacagcagccttcattggtcacagaagacccaagtgaggcttctggaggtgcccaacagaagaaccagctgagataagaggcagaaatcaaaatagaactggggaattctttcctacttaagaacttcaggatcaatagtttccttcatctcacctcagatatttattcaaccatccatccatccgtcaattaatttaatgcattaaatcttaccaaaggtgttaataggattgtaaagatttagttcatctacattttacttgagccctctgaggtagataaatgtagacaaaaatgtaagtacctctccatctacagacacagttatgagtctaagtagccattcagagattagaaagcactttcacatccatgcagttgttccatttctgaatgtgtgcataagagagtgcaaaatcaatacacaggacagacgcatttatgtatttcatgcaaccttcacactaacattctggggtagaaattatgatctcgcccattttatacctgaagaaacacaggctcagaggaggaaagggacttaggctatgggtacgtatttcctagacagtattgtagaatttaaatgcagataatctgattccaaattgtaagttatttccactgtattacactcttcccaaattaggaggatgctatgttctgaatgtttctgtccctccaaaattcatatgctaaacctaagcaccaacatggggggattaggtggtacagcctttggaaggtgactaagtcctttgttttagagcaatgccccagagagcttccttgacctttccactatgtgaggatccaacatgaaagcgctgtgtatgagcaagatagtgggccctcaccagacacaaaatatgccttggttttggacttcccagcctcctgaactgttgttttcaagcttcccagtttatatttattgtgacagccccaacagactaatacagagaataatgtaacttgtgtctgcttgtattgctagtgtttttttttttaagtagtgtttttttttttaagtaagttttttttttttaagtagtgtttttttttaagtgtttttttttttttttaagtaagggacaaaactttaacaggaaaaggaatacagattatgaaatgctaccattcaggtttttatgctagtactttaatactccaaattaaagtaatatattcactcacttgctaaataaagcttatatgactagagatactgaataattcttttagtctttaagtcctctaaaaaataatagtgaaaacccaaaattgcttaatgagacatgtatgaccttgtttatttagtatttatcatagatgttaaaatgatcatggttaattttttttttttttttttttttgagacacagtttcactctgtctccgaggctggagtgcagcggtgctatcttggctcactgcaagctccgcctcccgggggttgcaccattctcctgcctcagcctcccaagtagctgggactacagctgcccaccaccacgcctggctaattttttgtattttcagtagagacggggtttcaccatgttagccaggatggtctcgatctcctgaccttgtgatccgcccacctcggcctcccaaagtgctgggattacaggcgtaagccaccatgcccggccgatcatggttaatattaatgtaagaaattagagaatgtcaatgaaggtccattatatgtctattaaatgaaagtgttagctgcttatagttattttcgaatttaaattgccttggctcacatgccgttttataatttcaaatacataatcagaactcttttgcatctagtgaatcagtgctgcctacacaaaactcctttatcagggaagagtgcattatcaatcaaactgaaacgaaataacagaaaacaagatgaagtaagtcatgtgtagctactggctgtaacttcaaatgtataatgatggtgatggtgatgatgatggtggtgatagtgacggtgatggttatgatgatggtgatgtttgacagttataatgacaatggtgataacagtattataatgatggtgatgatgacacggttatggtaatgttgatggtgatgctaatgatgatggtgagagtgatggtaattatgacggtgataaccgtgtgatggtgataataacaacagaaacttagacaactaggaacaatcataatttttttttatgtttttggcatacacaacaattacatttcacaataacaacttatcaaaacacaaagagataatagctgggattttgttgttgttgttaacagggtttgttttatctttttgatatctagatacctttgacaaaaacacccaaacttctccatttcaaagataacgaccttcagaaataactgctgagtatagtgagtttggggtttttgcaacattgaggtcgataatgggacctggagatgtcagagccctgagtaaccgtccctctcccaggcagctactttttgagatggaaactgtcgctaatgaatggatgtgtcaaaactgtcaggtcctaagagcaacagatgacacctgtcattttaactcacaggaaagatggtcaaaaatattcttcaattataggcaaatggaatgcaacaccttcaggttataaagactccactaaaaccatgatcatttttaatatgatttatggctacttggtgagaaattaatttcataaaatcagtgtgatggaacactttataacttttaaagctggagtgcatgacaaacatattcttctaggttattacttatattttaggagcatttagatgtgtttgtaaacccctaccccaaacataaacttccaccaccaaaatgcttttagagattctataattatatccaaagcatgtatgataaacttgctctaattaatgaacataaatttaggtatctgaatttaagtatagtagaatttcataggataacctgaaacaatgtgaaaaaataaatttggtgaagaaaatctttcaaagctctttgacaggggattcttaaaattcctctgtatttctcacagcatcctagcatagtgctgatacgtagcttgtaatacgttctttagttgaataatttgaaaagtcatctctacaacaagggtatggacaattttaaaattaccttaacaggccgggcatggtggctcacgcctataatcccagcactttgggaggcctaggagggttgatcacatgaagtcaggagttcaagaccagcctggtcagcatggcaaaaacccatctctagaaaagcacaaaaattagctgggcacgatggtgggtacctgtaatcccagcaactcaggaggctgaagcaagagaatcgcttgagcctgggaggtggaagttgcagtgagccgacgtcgcagcactgcactccagcctgggtgacagaataagactcagtatcaaataataataataataaaaaaataatgtatcaaaccctttgtataggttggtgcaaaagtaattgcagtttttggcattgaaagtaatggcaaaaacctcaatagcgtttgcaccaacctaatagcttattatccttcagacacatcacttccttgttcttttctgatttctaattcttttgtttacttctaatgttttgacagtcaattaacttgggcaacctcaaagtttaaccaaatctctatgttttcctccttcaagaatgacttcctgagcctgggccaaatagggagaccctgtctctacgaaaagttgaacaattagccaggtgtcatggtgcacacgtgtagtcccagctacaggggaggctgagatgggagatcgctcaagcccaggagggcgaggctgcagggagttatgatagtgccactacatgccagcctgggtgacagagagagacctggtctcaaaaagaagaagaaaaaaacttcctgggagataataataataaaatcaatgaacacccacatgtacattatgatcattaatgtagccacttcctgcctcatttcttaaccatgacatatatatttggttataaaaacaaaggcaaaactgaacaagatgaggacggagagcttactttttgccttaaatgccaaagcgtttttgcaactcgctgattactgtcaattatctcacaattgatttatttttcagactagtaactttggaattgactcctcctttgttagctcccacataccttcctcttcctttcaccctcagacaaatcatgacaggcagtaagttaatcatttgccatgttacagaaaacaaaacagagaccgcaatcatgaaatcttttctaaaattgacacagtcaagttggtgaaagagtttcaaccagaatgctcattttctgatgttgagaactgccttttcatgctctctctcacaatttaaggcatatattgataatgacagagaaacaactactctctgtatttgacttgaagcacaggatgaaattttaagtcaccctacatacttgccttgagaacatctaacctacctgagatttaccgttagggtctttttcctttggtattttcagatgcacaactgccactgtgaaggatcaccgtctagaaccatccactctaccacaggtgtgaatttcctcactctgcttaaactctgaggatgggcgagtgctaagaatggagtaaaacacccaaaagagtagaaaggggcaattaacacttccaaaagtgtctcgaggaggatacccacaagagtggaaggaactgctcgaataatttaccactttgcagaggggctgatggattttggcatttttctgtttagcaatttttctctcaaccgctatggtctaagtcctgttccagaccttaatggtcatcaatctcaagcgactgcagcagtctctcaggcaattttcctatttttagaatttccattcccatctgtttatgcagctagaatgtccatgactatcatttaaattctgtcattttctttttctgttcagaaaccaacccatatttttccttgcctactttcaagaatgttgccactgtctctgcaagaactcccctttctagtaactcctgccatgccccccatccagccaagccagccctcttgtgcccccctctctaggtggatctctggattcgatctctgggcttccacatgacaccccctcctccaaagcctgccaccctgtaccctaatacatgcctctcttgcagtaaaccttcccaaatgtcccccagaagcctcacctcaattgcttggatgatctctcagcatttgtaaaccactcatgattcattattcagggtaagttaatatgtttatttgtggtcttgtgcactttttattttcgtaggatctctctggaactggtaggaacttgacgacagagaccttgccttctacctccttttatgccccagggcactaaatgtcaggatctgcatacaagaatcactcaataaatattgactgagtgtcgctgatggaccatttgtcaaatcgcagagttccctttggaattgctgtgattctcttgatactctcccccagagctgggtaaatgctgctatgtgtaataaatggttcttctgctttcctcttcctgaacccctgcttatcccacgcgtagacagacgaaagacttgctactcaaatgacgaaccgtgttccaccatcattggcttcccctgatggctcatgaaaaatgcagggtcgcaggcacacaccctgcctaatgaaccggtgtttgtgttttcccattatcccagcaaatgactttatgttactcaaagcttgagaagcactggtttaaggggaggggtttccttcttgggacaatcctgttctacgcagttgagatgttgatggcctgcagctacttcccttagtattcctaggtgtagcgacttcaaactgaaaactctgcgcctggtgatttttaagctgagtaaacatatgtttgctaaataaaacacttatagatcatgaagtttcatccatgtagttttctatcactaacaacctgtacctttgttaaatgtagtgatcatagaatcagtacttataaaccaattaaatcaacaaatagtttttcatagctactctctgcattacattgtattgtgtgttataatactaaaataagtatttaatacaactttcctgccatcaaagtgctagtaacccattggtttatttttccatttttttctcgatatattaataattattttttaatttgctaaacacatgactagaagttatgtgattatttggtatttatcctactggaaaaaatctcactgcttgactgtaaacctagcaaaactcctccgatatctcacagttgcaacttccaggtcaagactgtactctgaaacaaaataacacatctctaaagtgacaaccaacttgtcaataaactttaattctgaaggtaaaattatcaaggaagcccatatccgggatcaatttaccaatgatctctctctctctcttactgtctgtaatggtttcctacccattttcatcttttctaaccttctaatgtatagctatagatatatatctatcatgtatagctatagatatatatctatctatcatgtatagctataaatacatatctatcatatatagctatagatacatatctatcatgtatagctatagatatatatctatcatgtacagctatagatatatatctatcatgtacagctatagatatctatcatgtacagctatagatatctatcatgtacagctatagatacctatcatgtacagctatagatacctatcatgtacagatatagatacctatcatgtacagatatagatatatatctatcatgtacacatatagatatatatctatcatgtacagatatatatatcatgtacagatatatatatctatcatgtacagatatagatatctatcatgtagatatagatatatatctatcatgtatatagatatatatcatgtatagatatagatatctatcatagatatagatatatatctatcatagatatagatatatatctatcatagatatagatatatatctatcatagatatagatatatatctatcatagatatagatatatatctatcatagatatagatatatatctatcatagatatagatatatatctatcatagatatagatatatatctatcatagatatagatatatatctatcatagatatagatatatatctatcatgtatagatatagatatatatctatcatagatatagatatatatctatcatgtatagatatagatatatatctatcaagtacagctatagatatctatcatgtacagctatagatacctatcatgtacagctatagatacctatcatgtacagatatagatatatacctatcatgtacagatatagatatatatctatcatgtacagatatagatatatatctatcatgtacagatatagatatatatctatcatgtacagatatatatatcatgtacagatatagatatctatcatgtacagatatagatatctatcatgtacagatatagatatctatcatgtacagatatagatatatatctatcatgtatatagatatatatcatgtatagatatagatatatatctatcatagatatagatatatatctatcatagatatagatatatatctatcatagatatagatatatatctatcatagatatagatatatatctatcatagatatagatatatatctatcatagatatagatatatatctatcatagatatagatatatatctatcatagatatagatatatatctatcatagatatagatatatatctatcatgtatagatatagatatatatctatcatgtatagatatatctatcatgtatagatatagatatctatcatgtatagatatagatatatatctatcatgtatagatatagatatctatcatgtatatatatatctatcatgtatagatatagatatatatctatcatgtatagatatatatatctatcgtgtatagatatagatatctatcatgtatatagatatctatctatcatgtatagatatagatatatatatctatatatctatatctaagatatatatctatatccatacatgatagatatatatctatatctaagatataatatatagatatatatctataatgtatagatgtatagatatatatcttctaatgtatagatatagatatatatccacctatatatctatatgtatacattggaaggttagaaaagatgagaatgggtaggaaacaattctatatgtcaccttgttataggtggttgcaattatacaaaatattctgatcatcatattcttgaaattccattcacttcattttcatggtatcaacataagagataagcttaaagctaggcaattgtcaacatttcattctattgtttctacaaaaatggaaattcctcacggttctgcctaacaactcattatagcctaatgaagattttggttaatatgtaatgaagatgaagtataattaaataattccccacagctaaaaagttaatgtaatatttaataatgttgttaattatataaatttaaaaatatatcagcacatacgtggtagggcaatgtatcacttattaagatggacttctcctttaatgggtgaacatttaaaacataagtaaataatgaagtatactaataaaatacagtcaacataataattgaatttcaaagtctattcaacttgaaatgtcaaagaacttcaatctgaaatatcaaagaacttcaaccatctctattttcaaactcaagtggctataaagtagtttttaaaattgaggtaaaatatacttccaggaaacgcacatgtctttgttatataattcaatgattgttgacaaactgttcactgtcacaagtagagcccacaccccggatgcaggcataaaacattttcatcaatatggaaatttcatttttcctcttacattcagtttccatcccttccctccacaggcaacttttctggttttattaccataaattcattacatctgatctttaactttatataaatggaattatatattaggcaagctctcttaaatttggattctgtctcacaatataatattttcaagattcacaaatgttttatgtttcagcaagtcacactttttattgttgggtagtgttcttttatacaaatatgttataatttatctctccaattaatggacttttggattgtttcaccttttggctaatacaaacaaagctgctatacatattcttatacaaaatattttgtggacacgtattttcattaaacgtgataaaacagaaaattcctaggttattaggtaggtatatgtctgacttcatataaaagcactaacgattgttctaaggtgattgtaccattttatattcccacagtaagtgagcatgcaagttgttacgcatccctgtcaacatttgatattgtcaagttttgtaattttagctgttctcataactatttactggcatctcattgcggtttcaacgtgcatttccttgaagattattgatgttgataaacttttcaggtgcttttttgaccatttttatttcttcttaataatccattgaagtattgtgatgattgaagtcttagtgggttttttattatttatttagaggaattcagtatataaatatgtttagtgcatcatatgtagtcttttattagataaaacaatttttaacattttccgctacagagttcatttctgtatgaaatgagctgtagctttcctttttattttcataatggtactttttaataatatcttatttatcaatgttatttcctcttaggattagtgcttcgtctatcttaagacaactcagtatatctgatggcagtaagtcactctcttacattagcctctagttttttaattgggtctcttatatgcccaagtgtgagtgtgaggtaagagtgcagtttcactgatatactcattttgatttcaggaaccacttgattcatatcttgtggatatactgcagaaggtcaaaaggtgagaaagaagaggaaagacagcaaagatcatatgaaaacacttttccagagttttgagaggtgattgcaatgaaaaggcaattataaataaaatattaactttgcttccatgaagccagtactcatgctatataaaaaatacatacatttattcaagaagatgcatttacacacatataagtgtatatacacatgtacaaacataactgtatgtatacatatacaaaaatgtcactatagatcagtatttagaaattttttttactatgtttgtatttaattatgggacatctgtttataaattcgtgttggttgaaatttagtaaaatgttgtattttcctactctttcctattttcctttgttcatacagacatagtcaagtttataggtgcaaaagaagaaatgtggagtcaagctaaacatatcatatatataaaaactctttagtagatccatttatatatatgggtgaataataaatatgccatataaatgtaatataatactttttcagatctgaaaaagttaacaatctttgtatagtatgcttaaataattagaacatgaaaaacttccaaatgccattttttattatcctcaatttgctacatagtttaatagttttatttaacacttcaataaaaagttttataatgtatttatttgactatcataagaaaaagaggaatagcacataacttacctttcacaactgattctacagttttttttctttgatcacagcatttttttttatactttaagttctagggtacatgtgcacaatgtgcaggtttgttacatatgtacacatgtgccatgctggtgtgctgcacccattaactcgtcaattgcattaggtatatctcctaatgctatccctcccccctccccccaccccacgacaggccttagtgtgtgatgttccccttcttgtgtccaagtgttctcactgttcagttcccacctataagtgagacatggatttgaagaagtaaagcatacatgtaacattaggtaaaatggatgatctaaaatatgtgactaataaaaccttatcatttgaaactgaatacatcaacttttcattggtacagtaaagaaagaccccatttggcttgtacttgtagcattgcagaaaacaagttatgtatttgaggcaaattttgcttccttatctgacagttaagtctgccagctgaacgtttgacattctgtgcattgttttataataagctgtacaaaactttactcactgctaaatccaattttcatatctatgaaattctatagtgaatattacaaatctctaatctaaatggacatgaggctaggttttggaagatcacagtcctgaatttaagctacattgctgacttgctatataattgaaaaattaatgcaactttcctgtttctcaaatatccttatcaataatggaataatgaaaatgtctggggtataagcatttcactctgaagtccactatttgtgtaaccttgtaaaatcacttgacttttgaacctcaattcttttgtcactgaaatatggagaaaaacatttgcagttgatgctacaggctttgtgctaagatccactgaagtatatggcgctatttatattgtgtatgagttgtttccatgtggaaaaagaacaaaaatcagtggctagacatgaaaattcagcagagagcagaactttcaacaaacttattgatgatgatacagtcatcctttattggaataacattatatattgggaatacaagaagtttaatgccatgagaagttatactgggcaaatcacataccttaattttataatatgtcaaaatattattgttccggaagtgttttgagaaacaaatgagcttacacaatgaatttaatgcaattattgacacctgtgaagtgcttgagaaatagtataaattctacaaaaagtgctgggacaactggatatccacatgcaaaaatgcatttggatccctacctcacaccatacagaaaaattatctcaaaggagatcatagaggtatgcaatggcttggatatggttgtctccaccaaaaccaatgttgaaacttgatctccaatgtgtcagtgttgggcctagaagaggtatttgggttatgcagacagaaccctcatgaacggcttggtgatattctcgtgggagtgagtgagttcttgttctgacaaggtaagaacagttcttgaaggaaaagattagttttgttgaggtagtttgtttttaagcaaattccctcctcatgtttggctgtattttgtacgtgcccacttcccctttgaccttcttcatcatgttttgacacagcacaaaagccctcaccagagactggtgccatgcttctgctatggcccccaacaaccatgagtgaaataaacctctttctttataatttatccagccccaaatattccttttatcacaacacaaaacagactaagacaatttaaatttcatagctaaaatcataaaaatatttgaaaaaagcaaaagagtaaatctttataaccgtggttgaggccatgcttcccttgatatgatacaaaaagcacaaggaattaaagaagacggaaaggttaaattttaccgacattaaaaatttttctgctgcaaaggataccaccaagaaaagatagtccacataatgagagaaaatatttgcaaatactacatccaaaacggtctaataaccagaatatatagagagaacttacaagtcaacaacaaccacaaaaaccctaacaattaaaaattgggaaaaagatttaaatagacatttctccaaagaagacatacaaatggccaataagcccatgaaaagatgctaaagatcattagtcatttaagaaattaaatttaaaaccacagtgagaaaagccacaatgagataccatttcatacccactagaagggctatcactggacagatgataataggcactggcaaggatgtagagaattggaaccctctcgtgttgcttgtcggaaagtaaaatgttagagatatgctggaagacagttttgcaattcctcaaatggttaaaattactgttaccctgtgagtaaagaattccactcctagtttttctacccaagaaaactgaaaacatatagtaacacaaaaactagtgggcaaatattcatggcagcatcattcataatatccaaaatatggaaacaattcaagcattcaccaactgatgactctggacaaactaatatagcatacacattcagtagcattttacgggtcattaaaaatcaacaaagtactaaggtatgttggaatactgagggaccagaatcattaaagtaagtcaatgaaaaatcacaaaacaccacatattatgagatctcatataatacccaatgcctagggtatagggtggggagtcagggtagaacagaaaatgactgataataggtacagaacattttttaggggtgatgaaaatattctaaaatcggattgtgatgactgcacgatgatgtaagcatacaaaaattcatggaattgcacactttatgtggataaacttaaggatatgtaaattttatcttaataacattgttttaaaaaggtaaaataaaaatatcctcagatactgcagcattcaaaaaataattactatgacaataaagaaagacattaaagaagggcttatcacaccttgtaaattcttaaaaatatacatgatagaggcataaaatgagtttggaacatctacatggatgagatttctgctatttttccactttaaaatactattgccatttattatagtaattcctattatgttatacatctgtatatgtgtgcatgtgcttatagagatatttaattgaaagggacaatgttgcatcattttcaaacaaacactattattctttagacatttttttcttattaaatttgtcagcctgatacataagtatcaacttcattcatgtgaaattgatgtgaggtcactttctaagctcagtgggaaatacatttagcagaataattttgccacctacttagttaaggggagaaatacaggcttattgcaggatgtaattcaccaactgtttatataattttaagcctttagtaataaagcaatcatgagcttgtcactttacttctctactcatgacacttcaaaacgcaataaaatatagtgcttgacaattttaatttattttaattaaaagacatcccaaaagcgtgatgcaaatgcttgaaaatttaaagcttagctccctttgctttaactaaagaaatgttcgattcgtttctccatcaagtgaagggcacttttaagcatccgcactggcccttagatgatgtggtctttaaaaagaatagtttgatttgacaaaggaaaacaggaattttgaaagaacctacaaaagaaagacttgaaaataatcagccaaaaatgttcatgatcatgttgtagggtgaaatatttattatttccttttgtaatgataagaacaatgaaatccagaaaaaaatgcggaagatgaataaagtggtggcaacagccttttggtctatctctatcaaaatgcagtgttctctccatcatgctgtctctttgaaggacttcattctaagtactcatgttctaatcatgctgaaagcaatataaaatcattcatttgttcagaaataatttttgagtgatgacttgtgtgccaacccccattctgactgcttggcataaagtcaggaacacgggttctcattgcataaagttgacggtttagcagcagctgggtagggagatactgctatacacaaatacttcaatagacaagacaagacaagacttgaatggtaagctgatcactgaacccacgctggagaggaaacaggtagtgtaggtagagcttgtggtcaaggagattactcaaaggagaaaatattaaaccccaagttattactgcttcagaggctgaataacaagaagagcccatgcacagaaaacccaggggctgggcccaggacagaggtacgcaggagcccacaggtgggaaaggctcagatggttcatgaaggagaacaaagaccagtgtgtctgcagtggactcagaacatttgagcctggaaggagaggagggttcatagaggccagagtggcaccacgcagagatttgttggtcagaattaggagtttggattttattcaacttcagattggaagccagtgacgaatcttgattagggtcctgaagtaatttgagtaacatttggaaaatatctttctgcctactatgtggagaatggaccactgtagacaccttaataaacatggcaaagaggtgtgaagctactgaggagaggaatttgacttgagtgacaatagcagacaaggagagaaggttaagagacaaagtttctctttttttctttttttgaggtggagtcttgctctgtcgcccaggctggagtgcaatggcgtgatctcggctcactgcaacctccacctcctgagttcaagcgattcttcttcctcagcctctgagtagctgcgattacagacgtgcaccaccacatccagctattttttttgttatatttttagtagagacagggtttcaccatgttggccaggctggtctcgaactcccgaccccaggtgatctgcccacctcagcctccagaagtgttgggattacaagtgtgagccactacaccaagcctagagacaaaattttaaacgtcaattcaaaacatttaacttgcaggtgcagaatactaaaataaataattttttttgtgctgagaccagttgaaactctaatgcgtcttaaaagaagcagtatcaaaaatacccagtgtgaattaaccggacacaaataaaaaatacattaattaaattttgttccagaaaatgaaaaatactatttttctaaattgacatgacttactataatggactatggaataatggatttgatcactttattaattttaatagctataaaacatttacgcatcatgttgctataaatgagattagcaaaatgcagtcacaggtccaattttttcttttatgcatattttgtagtatctttttcatttaaaaaatcactttacgataaaatgcacacataattcaaaatagaagtgaaagaaaaattaagagaaatgtgagtaggaagaaaaatgtaaacacatatatttgtgtatgatatttgcttcaactgatcatgaaattagcctttaattttacagtagctgagaaagaaaatatgtttggtaatctaattattcatatctaataattgagtacaacacatcataaagaaagggtaggttttctttcctgttacatgattataaaaaagtagcatggattagtgaaaaatgactactttagagtttcaggttagtagcacagtaatgaatgacttctccacctctgtggccagagaagcaattgttcgttccactttcacagttcacttcttctggtcttgaagaggcctggttggtcatattcacactggaatataacaccacttaggcacagagaattagaataacagatactacgggaaccccactgttatgaatgggaaggggtctagaattgcctcagattccactaggacagcagcatcccattcaaagagaccacaatattccccaggactacaacatgacaagggaaggagtcagtttcctgcgggacaccagcatcacaagggaaccaaccaccatttctcctagggcatcagcatcgcagaggaaggagccacagattccaccaggacaccagcctcaaaggcaagaagctacaactttttccaggataccagaattacaaagagaggagccacaagttacccctaaaaccctgtaatcacaaggaaagaagtggtcacctctcagcagctctgagtggagcagaaatgatctactccctccctctttctgacctccactctgattcctgaccatgttcagggatgactctgagtcctggaacactttcatctgcagtggaaaagattttttgtttgtttgcaagaaacaggtgaaacctttctgaatcagttttccagctaagagttatacctgtagaaaggatattaccttggtggggagtaaaatgaaggcaagttgggtatttgattgtactactgtaccattgtgtttcattctttcctatctttcttctttttttaattcgagaatcttacttgtttgtgatactctttgagtccgtcccctaccccagtctttgtgagtcatctcattcactctgtgcagaattaccattcaagccttttcaacttcctttatgacaaaaatttcatgcctcagtttcccagatttctattctggggcaaaccaaacacttcttgtagtggacatgctcaccagaaagcactgacacacctgctcttgaaaggctccttcttcttccgtcttcagattctaggcaagacttttgctcaggcaaactgggggagacctggagcagcttcattgcacattaacttcttcaatggattttaatttataattggacaaaaattgttggtttagtggtctccaatatgccttttagttgtagtatttatgaaagcatcaaaacagcacagttctgcctgacacaacccatcatataagataccttgggtcgtccattcaaacgcagagtgctttggatttttcttcctctcagattatggagtacatgcaggttgttttcacagtaggatggaaggcctagttttcattctgtctatcgtaatgatggccttaattctttgggtaattaatagattctttacaaccaagtatatagaaatgaaaataataaccaatatgcccctgaagcctgtgggacacaaaagcgtgtgtgaagccctcaagcatcctgatacggccatggcctgaataatgaaggcaatttgaagctatcagcttctataactgagtctccaaaagaaccaacacagagccacggtgctctgtgctttgaggcatattcactcactacctacacgcacacttatcatagaaatgtaaactcctgcagagcttcttcccagagtagtaggaacaacatcaataatcaatgtaagtcagcttcatatgtgcatcagacaatgcgttgagcacttgaataatcttatcaaatcttcaaaacaatctaatgagaggtaatatttccattttaggtatggaaaaacaaatttaacaatgaagacaagtaatgcaaaatgttagttgttttagctactaaatactaggtgcagcatagttcagaactaccttttctaaccatttggtctagctagcagacacaatgtaatctagtaaccaattaacagtagttagagacttaatataatttaatccagtagtagtgaggtacttattctaattgtcagataggatttaatccaactgcttaatctgatgatttattctagctactaggtgccagataaaactggctagagggctagaaatattgtaacccaggcagtctgactcacaagtctggtagcttaattattactatccatggcttcccccacgcactgggggaaggttaaattgactttaatagggcacatttcctaaagaaaagtttaaccttgatccacagcctttaattttctcttgtgaccttctaaaatggaaattttcatgaagaagccaggacattgataaacctatatttaatgccatagtaatttccattctttgatcaacagaaacttaagcaacctataccgcatgccagcaaaataaaatacagtatctggttttgtacttgacaaagagaaaagtaatagaaagtgattaatctgggaatattcccaagccctttatagaaattcaatactgtattcagcagaggatgttttctctgattttttttatatgtgtaatgaaaggcaaagatcactgagccagaaatgtcaagttatctttgaaacatgaatgcagcattaccagggcagagcttcaacagatactaatgatatgttaattagttaattgcacattttaataacagacttacaaagccacaatttctttgtgtttaaataacataattgtgtttcagttgtgttttcagtaaacactgggaagttttcattcacctacacatctctatataattaagttttggcttttcttccttgagctataagggatcctaatgtctttattacacaggaatcatctttagtcatctatttttagttctctctctgagatatctagattgtcattcaggcagatgcacagaccctcactgagatcctagcacatttacaaatggaatgactgtgctcccttggggtaatgctaagtacaaaagcaatccccttcttgccaagtaatcacatagaaaaaataaattgtaatttttgaggctaggtggcttgcataacttgtcaaacaagacatgcagccctattcctgtgtcatttaaatgctttaaagtcgtctcattcttgagctctatttttaaattgccttttctacagaagttacagcagtggctgaagaaaatggtttgattatagaagacctgttcaccctcagccacgtcactcaggaatgcatctctgtgaaatcatctataatctctatgaaattaaaaaaatgtaacctattaaaattgtttttgcaaaaacatctgtgatctaaaatatactaagagatatactacaaaattcactaagtagtcacatttactaaggaatataaagatttttttcattgttgttctttttatattaatgggagcctctcttctctaaagacaaatttctggaaatgtttgggtcttggtatattcaaaggactgactgtgataatgacaaccgtggtaaaaagtaagttttactactcaaccaaaactcattggaatgagtcttcaaaagctgtgtttctctctttatacttttcagtaatatgttttctgccttatgaagaaagactaagagcatgctaccgtggtgaatttacatgcaaagtctgtctctctttatgatatggggagaatcctcatgtttgaaaataattgcacactgctgtcactattatcaaatactattgcatcagagatagttcctgagcccaagggacttaggtcttgtttgtaggatatttctgaggtttggcactctagaagttcccacttgcgtaaactttcaactctctctctttcctagcatagccttgcaagaacacgagttagctttaggtagtttgtctcggaattggaaaatttcaaggggcatttggcagtagagcaaggctatttatttccaaaggaaagcgcagcccttaggtctcaatgagaattctgaagtcatatcagggattttaaacttctagtcaggcaagcctcaattccgtgttagtgctatgtagaggggtcgtttgcaagaagagccaaggcactggttaaacaggtttgagtcaacatgacatggatgattcaaggatgctggaaggcatgaagagatacacttagctttccaacagcccctggggaatcacgcagcttctatcatatatgacaacctgccaccgggcacatgctctgccctctattgggaatatcttcctctttccccttccagcccccacagacctcattcttactgtcctttactaatataacttctcacccatcaggtctccagttaagtttcacttcatctaaaaagacttctgaccagctgggtcaggtcagctccctttgccatatcacaacacaatgcacctttcattgaaagttcttgttcacgatttttatcgataaatatttgtttacgcacttgtttatcactgttctactcactaggctctgtttcagagaattagggactgtaaacctttgtttccttctccatcaaaagtgattagtacaaactacctggttcctggggatagttcatactgggctgcgtgatccttcagtttccttttaattgggtcatcccagaaattagtgggttctcaaacattgccatgcatcggattcactgggagagcttgtgaaagtgtagatagttggccccacctgcagagtgtctaattcagtctgtctctggtggcggctaagaattctcattctaacatcaggtgatgctgatgctgctaatctgggaaccacacttccagagacactgccacgaatctataggtcttcaaggaaggttttcctaagaggggagttgagacaacaggaaagtattagaatggggggttctatgtcattaggagaaaatgcactgttcacatactgaaaacgcaagaatgcagacctctagaaaaactggtgagaacgtcaatatcacccgttacgtacctttgcctttctcccatctttaatctaatcctcatttacttcatatacaaccaacatttacttactcaagggccttccaacttctttgctgcaggccaaaatagacaccagctctgactgccacatgcaaaattaattgctgccatgtctgtagtcctctgtcacacctacatatttttattatcatgcttgtcacatttaaatgtttattcagctgtctttctgccttggtttgccaagagtgctcccaggccccaactgactatcatagtgccaggcatatagcaggtgctccatacatgtccaatgagtcaggacagtctagtctttgacagtatagagaagttttcatagagatttcaaaaggaatgctggtacttccatgtattcctgatgtttcacaggacgaagacaagacaaaacccaaacaaccagagccactgggaaagaaatagtgcttctcagtcacaaaaatcaaaatgggatttgggaaatatggtgacccttcagggagagctaagtccaagtgttttcttgttaagaagggatcgaagggagcacgggaggacctgggcacactgcagactctgaggcagcctttgggacctggggctggtcatggaagaggtcagaatgggatgcctccttggtgtggtctgtaatcaaccgagggtcagtctacaagggttagaaggaggcttctccgacagttctcccttgtcactggtgactcattattgggggactggagtctttagtttataaaactttgagaaagtagcttttctgggatagaatagaaggaaatggtttatctcttgtaaaacattgaatttgttatgaaaaagccttggttcaattcctggctttggcaatgatcatggtgttgcatcactgggtccggcacatcatcaggctgacctcactctttgtaacacaaaattcaaagatggggccattgatctttaggctcctgttcagctttaaacgcaggcattttcaccctgagatgttgagaaaagtgcttcctcattcagccctttatctttgaaatggggataataacgtttgttctttattaatataagtacaagtactttaaagctatgaattaacactgttccatccgtttgatcactccgtcttactggcaggggatgaatcttgaattctaaagagctgtttttcctgagatcgtgataaaggtagttctaaggtgactcctctgtgtgtacctatgtccataactcctctatgatattaaatatccaacaggactgtgagatctgaattctttttctattcgaattattttttaagggagaagggcaatctgtgagtatgaaacacccaagttaattatgaaacttagagagcaattaccagagataagtttatgagcacggaaaactgctaacctgctataaccttcacactgtaccttaattatggacaattatggttttaaacttcagcctttacctgtgattcttacttgttctgatctatagaccatgtagtaaggcatttgcttcatgttcgacttactgggagtgggcatggattttatctagaatagacatttggtttttcccaaccgagtgcctgttgagagttttagcagagttgttccctggtgttccttgacaatgtgttcttttctctgcacgcctgaccacatcctcggtcaaggccatcatgggacaaccacaggcacacactccttcagaacccaggaccaggctcaagtcaggccattccttgccaccatctatgccaggaatcaatattcaatactagatggatgtttgtttttgtaggaaaattgtgaaagcggatttcacaatgcggcggagaaagggaacctccatggacaatagctgagtgagagatgaggagaatcagtgctatgtctacactgcttcagcaactttaagggtgttcatctccattagccaacacatttttgtcttacttaagccactatgtgttgtgtttttgctcatttgaagcctacaaagtcttaacaaagcacatatagataaaagtcctggaaaggcttttgtttgtttttgtttgcttcagtgtttttctgagatgcttacaacctaattcaaaccatttactaatcttcttatgcttagtgagaaaaaaaaaattccataaagcatttcacgatttcatcagtcactggggtaatgaataaaaagctacacaataatttccttaaacgggtgtccatatttgtattcatattcacatgacaattctgtaagtctaagcagtgagttgtttaataaaagagaccacatacaaacaatatatcgtttgtactcaaaagatacaggaaagggaacttcacaaaataaataaaataataatgcattgtttttggtggggactctaatctcacagggtccttttctgagctttgcctctcaatgagtcatgtgaatgacaatttgtcctcagcctctataccaggtagtgagatacttaaatgcagggaaattaaggactgttgacacctagatattaattaaagtgctcacaatgatgtggctagattaaaataagacacgatccccttgaaatggtccatgttcttttcacaacactgaaaaacagtttgtggggaagagttcaaaagctaagctgaaattcaactatcctcggagaccttgcttatgaggaaataaatacttacgctataaagggccaaaatggaaaatacattgactgacaaatctgtatcctagccacagtaaagaggaattaaggaagagattgcaacgcatgcaaatgacaacatgagctgtttgtttcctcagtagactccacaaacaccacatctccccaagtcttgcctattttaattaaccaagggtcaatgtatagtagctattgaattaactgtctttcctttgaggttgctaggagttttgaaacatttatttcatcacatcctgaattggccaacgaggaccagtttaatgacatgccagctctttcgtggctgtgataatgtgttttgtcctctttgataacgtcaggtatctatcatggtaaagggaacaggcagtgcaatttcttgggaggaaatctggaattaactcttagattacttaatggtatattgtgacagcatttaaaaattgagtgttgtataaaggctggtataccaagaaaattctattttaagctagtttttttttttttttttttaactagatgaagactttcacatatgttcccactggcattgtaacacaattacatttcaaagaaattcatgacataattttacttcagtcaggtatccttgctaataaaaaagagggtgaaattgtcctgtcatcattaagatagcaatcaaattgctatccatgcaaatacatttaattgtataacctttaatatctgctaagatatcatatgatctgttatactgcaagtaaatttgattttgcaatgatgtgaagtaaataaacagtctaggagatttaaggaggtgatattttccctaggggcctgtaaaagaactattttaattaagtctataagcatggtatttagtaatgtcgtatcttttggacttttatgtgcattaaaagaagggctggcgtgaatatgaagactgatccatctactctaatataacacaacgtaggagtctataacacaatttaacaagaattttaagatattttaaaaagaaattcttcaaactgcctttatgcaataatgaacatattatgttaattatacaaaattatttaagtggcttaaaagccctgtactttccaatattcaactattcactcctcctataccaaatggtccatggtccatttctggaggtatgagggatcaagaagcaacagaaaatgatctcactctattaatgtcttctgttactgaaaaacttaaagtatgtcttcttgaaagcttcgaagtttatgttttctatcagacaagagaaaaagaagagaaagtgatcgcttttcctttttgctactcttcttacttgttaagtctgttgcttctggagtcttttctgagaaatgtaagaccctgaaatatgtgattcttacctaagtaaaaggagaaccgttcaacagattaatgcaacagattaaaaactgtctttaaaataaagctgatgcttattattctgcaaaatgtgtttcaaattccctgaaggaagagcttgagatcagaacccatgttctttgcaataacgtaccagctcagccccagattctggtacccccagcgtggaagtcaagatgcaaactgcaagacactttcaacatgtttcccagctcatcagctcgtctgcattctgaatagaaatgcgatcttgcttatacttagttctgaaattctgtatctgaatcttgagtcatttgttctttctactcagttcctgcaaaccagagccagttatctgaccaaggacatctttgactctagatggctttacctcttatacattatactatatcagggagtaaacttaaaaacaaacacctgtcatctctagagcatgacagaattgtcatgaaataatgatttgcacactccatagctttcaactgtggccgaattcatcctcccttccgtgacgccatttggcactacctggagacgcctgtggttgtgatatcagggtggataccacttgcacctagtggtaaggccatgggtgctgctggacatcccacagcacacagaacggcctcccaaacaaagagctatccaacctcaaatgtgaatagtgctgagatggagacattagcttagccctctggtgatcgctgattctgaagtagaaatcttaacttaggtatgaatccacaacttgcatttccaatggactattctgccacgattttctatttattcgtcacggtgtgattatttcaagccaactccagtaccatgaagaagcggactccttcatactagacacacccacttgtgttaattatttaaagtcatggtgaaaataaatgactttaaaaaccgacactctcattacttctgaagtcagccatcccaaaaaaatgatctttgaaagacaatcatctgcataataattactaaattacaatagttacatagagactaaactaagcaatggtagaagaggcacatgaagatgtttgggaaaaagattaaatgtcccctgatatttgagctgtacattttttcagaaaataattagacatgggatattttgcttagtatttctcccagatatagggtgagaagctgttaagtttctatagtcccaggtcaacatagtttctttctttgctctccttttatgggaacatagagtacccatatgatttgggtaaagtgtctgaggatgtgtcattgataacagaagaaagaataaccaatggtgttgagtattagttcacttctgaacaaatcatgcattttcggaacacatcaggagttagagaactgtgttaaaacttacagatgaaattaaatctggaatgaattgagattaattatattgatagtataatacactgacagatattgtgccagtccctcaggtttctgtgtaaatataaaagttaaactcaaaaatatgtgtaagactatgtttaaacaagatatcaaacaaaataaaagaaaaaactgtgcttttgaaaaaatactgctttgaaattacataaaaattaatatgacttaaaaatgtctatcactgctagactttctttttttttttttttaacaaataaacaacctagacaatatcctcccagtctcttatcaatgatggtgactttttcatactctgaattctttggacttggagattctcatgtacataacatggaaagtcataaaaccacattgttcatttgatctatagtagtgagctagtgaacgggcctagaaagtctaaattctagcctttgaatcccagcatgtggcagagaaactagagccagtgatgctccagacttgttacactaaattatcatcaagagtaaatagaaagaggaaaaagaacaaataattcactggactagaaatctcatttattcctccaataggtttacttgatgaaagcattacaacatcaaacttaaaaatggcagtaagatattgtctgtgttattaggtccccgtgggttggttctgatgatgacaatacttgccttcctgacaaacctgccttcacctttaggtctctatctcattaacacaacaatcgcaggctcagtctcaaagaaaacaagattggataaaaaccttccctctgtgctctctgcatctgggagaatcacgacttttcagacagaagggcacgtgttatattcgatcctggttacggtgcattcattttctccacattaaactagccagttgttcctcattctctgcagtttcccttgctgtgttttcagctacccacagtcaaccactgtcagaaaataagtgagcacagcaggaaaagatattctgagagcaagatggagaagcagaccacattcacataacttttattattgtatatagttatcattgttctattccgttagtagctgttatgaatctctcgctgtgcctaatttataaattaaacttcctcatagatgtttatgtatagttaataagtacaaatatacaggttaatggaagaaacaagacctagtatttaatagattagtagggtgactgcagttcacaataatgtaccaaacagaagagaataatttggatgtttctaacataaaggaaaaacaaatatttaagatggatatctcaattacactgattttacctttacaaatcatgggaatgtatttaattatgaccagaaccttgaaaatatgcatacctaatgtgtgtcaataatttttttaaaatatggtatactgtatatagggtttggtactatttgtggtttcaggtgtctactaggggtttggaacatatttctcaggggtaagggggcactatatatttcactttccacacctcataaattctatatggtcctccctattctactattctaggcagcgaatcaagagaaagataaaccaacaaataaatgattaaacaggttcgaacaatgcttctcattgtgttgtaaagaaaaaacaattttaggagatgacaagagagaaagaaacagggtgaaggaagataatctgttgagatgaggtctctgggaaagagaaatgaagatcttatagagagagctcttcatgatgaagggacatgtgttcctcgagtagaaagagacgacccctccccctccccaatgaaaatggtcaattgtccactctggaaaggatctccaaatccaaagtggtcatatcttcttcttcttttttttttttttttttttttttttttttttttttttttttttttgagatggagtctcgctgtgtcacccaggctggagtacagtggcgggatcttggctcactgcaacgtcctcctaccaggttcaagttattcttctgcctcaacctcccaagtagctgggactataggcgtgcgccaacattcccagctcatttttgtgtttttagtagagacggggtttcacctcgttagcgaggatggtctcaatctcctgaccttgtgatccacccacctcagcctcccaaagcgcagggattgcaggcatgagccactgcgcctggccatcttctttatttagagtcacagaatatttacgggcaatattcatctggcattttaggaaaacactcccatgttaaaaacttaaagctcttctttaatggaactttccacttctctactctcagaaggtatgctgagtttcagaataaagagctaaggagaaataacttccagaaacagaggtcttccaaaagccccaatgcagaccaaagtcaggaatgtttaataagcacgtgcatctggccacaccaagtccagctttcccagagtccagagcatacccttcacggcttcacactaaggacattcttgctaagatgcagattcagccctgttaactaccagacaaaaacctggtattagctaagtggattcttttggtatctttggtatacttacttgtattttaagaaaaagcccatttttactttattttaaaaccttccaaccccaaaccacgactctcgttctattcggcttggagcaggcatggaggtccgggctcagccagcctggcaccatgttattccctgagagcccaggacccaaagagagtttcagctaagggtagtgcctcctctgacactcataggatgccaactgcacactccccacagctgctcctccatgaaaacgcagagcccaccccaagatgcagcccctgggtccgtgcagcacaggtgcttcaccctctctattcagagccacagggtgtagtgggagagaagaacatacacatgttccaaagaaactccctcatgtgagagagctaaaccccttcctaaggtctccaaatgtttactcttggagggaaatctgagtttcagaaaacagcaccaaacaattattaactaattaactcctcatggatcagctatccagtgagctcaatgcatgtgctaaatgctttcttaggcatgagagatacaactgcagattagaccagggtaggcttaccccaagaagacaggagactagccagcatgaagacgtgaaggaggtgcaagaatgagaagtgctagaaaagggagaaacagggtcccatgggtccccacagcaagggatgcccggcatcgtctgatgacagcaatgatgaccttctgaagaaacggcagtcaacaaaggaagggagatggaaaacacaaccagaggaatttgatcaagatagacagatggtgttaaaacacacctggcataaccccaaaacacccgacctacgtccctctttccctttgagtcgctgtttaactactgtgaatgacaagatcccttgcatgatttaacagccttgctcacacttccttcctgcaaacttgaaagcaagaccaccgcacatgcccacactcactcacactcacacccttcttctaaggggtttggtagttgacaaacttcaaaagagaggggaaaagctgacatcaatgatttatcactctcttttgacatccagattgacggtaaaacatttcctgtttgtaggaaaatggcacagcttcatagcttaaggcagagtagagagaaaagtgtaggaggagatgggggaaagatttgctggtctagcaggcggaaaggaatctgacatcagaggatgagtctgcccacagtgaaactcaatgtctcccaggctaacactatggacaaccctctttgggctgtgtagtcaaacacctctgcttcatacctttcagttataaggaacttctcacctcatgaataagtcacaggaagctatgaagagatgagagagtgacaggtaggagattcatgtcatttcattttatcattatagctaccctctttgttttgctccagaaagtcaagtttacattaatattttatcaacaaggtaaagaaagttggaagctagaagtgcttccaacttcaccttcaatcgtcggtggcactgctctttctattctccaagaatgctggagctcaaaagcgaaggtgatttctacacacacacacacacacacacacacacgtatgtatataaacgccaacatgcgtaacatatatatgctgagacaggatctcactttgttgcccaggctggagtacagtggagcaatcatgactcactgcggccttggcctactgggggtcttaggtgatcctccaatctcagcctcctggggaactgggaccacaggcacatgtggtaccatgatcagctaatttttaaaaattatatagagatgtaagcaatccttttgcctggcctcccaaagtactgagattacaggcgtgacccatcgcacctggcctgaaagtgattttgcaaggggtaaactaaatcaagcagggatccagagtgctataatagaggcagactggacaagacacgccacagcttcgcctctcccttgaataattcatcgtttcccgaattgctgtccccagacttgaatcccttcagcgtactttccacttgaacatcacagtcatcttcacagatagaaaaatctcattcgagtacatttccacttaagacgctcagtgattctgcattttcttcagggacagatgcactgcttgaatgcagtatgatcttgaccctggtcagtttaatttgaatgccttgcacaaagtgctctccaaagtgctgggtgctatatataaaccatgtttgttgaggtcaggggtcagccatatagacacacttcccagaccatgtggcaaatgggaaggtagaaatatgtgtaggatatgtgagctcagaagaggacacagtagtctaagatgaattcctcttagatatatggtgtttgaactgggatatatggtgtttgaactgagtaccaaagaaggactaaaagtgagtcatatacattagcttaggcctacacagggtcaggacaatcaatatcactgtcttccaacttgataccttgtcccactggaagtttgtcagggtcaacagcacacgtgaagctgacatctcctatggtaacaatgcctttttcttccatttgtcgttgttgtgtttttgtttttgttgttgtttgtttgttttgagatggagtcttgctctcttgtccaagttggagcgtagtggcgtaatctcggctcagtgcaaactctgcctcccaggtttgagctattctcttgccttagcctcctgagtagctgggactacaggcatgcgccaccgtgcctggcaaattgttgtattttttgttttgttttagtgatggggtttcgccatgttggccaggctgatctccaattcctgacctcaggtgatctgctgacctcgacctcccaaagtgctgggattataggtcacaatgccttcttcggaatacctccttaaggacctgcctgagggtgttctatcttttttttaattttttgagccggagttttgcttttgctgcccaagctggagtgcaatggtgcaaactcggttcactgcaacctccacatcccgggttcaagcgattctcccgcctcagcctccccagtagctgggattacaggtgtgtgccaccacacctggttacttttttgtatttttagtagaaatggagtttcaccatgtaagccaggctggtctcgaactcctgacctcaggtgatccacccgcctcggcctcccaaactgtggggattacaggtgtgaaccaccgtacccagctctaggttaacttttttaaaagtagaatgagtacacactaaaataacaatcaaaagtataggaaatacattaaccagcaacacagtcattattattctcaagtattatgcactgtacataagtagatgcatgagacccgtctaagactggcagcgcaggtttgcatatggcaccatcaccacacacacgcgcatgtggattatgcattctgctatgacgcataattatatggctacaatgccactaagtgtaggacatttttggctccattaaagtctaccaggagctgggtgcggtggctcacgcctgtaatcccagcactttgaaaggccgaggagggcggatcactgaggtcaagagtacgagaccagcctggccaacacagtgaaaccctgtctctactaataatacaaaaattagccgggcatggtggcacatgcctgtaatcccaactactcaggaggctgaggcaagagaactgcttgaacccaggagcgggaggttgcagtgagttgaaatcgcaccactgcactccagcctgggtgacagagtgagactctgtctcaaaaaaacaaacaagcaaacaaacaaacaaacaaaaagtttaatgggagaaacaaagttagtcatggcaaggaatatgggaaagtcacacggagaaggtaaaaaccatgaactgtgcttccagaagctggatgcgatgaagacaacatggagaggttttcctacatttccaggcccttctctcatgtttcccttcacattctttgctctggttgtaatacaacttctgcatcacagttcctcagaacaccatgcggtctgacatctctgccttttgacctatgctgttaactcttcctgaaatgtcctatgttttgtctccgatttttctggacaattttttttctttaagagcaaagacggaacttctcctttctgagccaacccttgaatcgtttaagcactgctagtcacttcattccttgactagacactctgccatgtgcctgcttccatcacttaacctctggacgcatcccttaaagagacatttacccttgtaagagcttgtgtctagggggaagaacaggtgttttaaatatccctgaaatcttgacatcaagtactttaaaagtcgttgaactgtatctatgaagcaagcagtaaaaaagagtctgaaaccttgggcattttttaggttgaatatctagaaaaagaacaatgccacaaagaacaataggtattcctaactgtaatttcaggatagacaagagctgctaggtactcatgcacagcaaagttaattaatgtcttccccgacaggcaattctttgcttccgcctctatcacttcatgggtttattggtaacttttttctctgggcaccaccttctgtcacccgctacctctacttgctttattacattccgtcttcatttatgtcttctcagcttcacagtcacggcaatgacttcctcctgggcaggtgacaccctaaagtcctttgggttttgtttggcaccaaagtggaaatacaggtttgttgagaataaagagaggatggatagttgatttgtggaacagaactttgggcttattttttttttagtaggcacataaaatgagctatgcatgtggtatttagaatttagtgtgtctaaatgagaaccagagtaactcactgtgcagagctaagtaaagactgtttggtattctatccctgggctaagaaaagttgaatcaacttttttagtatattgcccaggttccctttggttacgaaggctgagtcagctgaaaacataattcggcatcagtagtttatgatttctatggttccggaagagatttcaagaggaataaattacctgggatctcatggccctttcatacaaatgattctcatcccaaaggtataaactgtggcttgtgtcttcatatcttctttatctttaccacatcagagaactcacagtttgcaatattggtgggttattagtttaggtcaaaaataaataaaatagctgagaacttcaaagtaattcagttttgccagataatgtctggaatcgcttcctcctgcaaaccatcttctgggtgcatgtgtaacagggacccagtactctcatttttaatcccggttgcattatttaaaggaaagttaaatactgttagatttcaaggcaagggatgatatttcttatgcaaaatttaggaaaggaagtataaaacgtttgcaatttttatgcaacgaatgtatttttgaaccatttagcttatgcttgaatcaaataacattttgttataaaaataaagtataacttaataaaataaaaaatttacaattataatgcaatggatacatgtttgaaccattcaacttatgcttgaatcaaataacatttttataaaaataatgtataacaataaaaatacaaaatcatttacacgttttatgcaatggatatatgtttgaaccatttaacttacgcttgaatcaaataacctttttaacacaaagtaaacttatatgtttttctctaaaatacttttgtcagtcttggtcagtttaacataaatatgttaaaaatgacttgatcataaagatggtaatttaaaaaatttttaaattaacttaatttaaatacttttctgatcctcagtttcattgtaacgattaaatattcatttttaattctacctttacatctctggtaattttatacaaacagatcaaataatttagttttcaaatagttctgaaacctaataatgtttttgcttccagtctctgtgcctgaatattccctctgcccaaaagtctgatatttcattcttcatcctggtgatttgtagaaaacaaaaatgtcacagtgaaattagtctcctcatgctatgtcggaagaaatatctcattcaccagccgagtcaaacattccaatggaaatatctatagctttggagatgatgactaatttatcctgacagagttgttgatttatctgagaaagaaattccaaaaaaacaaaaaccaaaaaaaaaaaactgctgactctttcacttaattcgatgttaacaaacgggcacaacagcctaggaatactgagaggttgccagatactatgtgcaaagtttgtcaaatgacggcgatttccctcccaaagctcagagtggcaaagctcccaatgggaaagatgaatagacattacaatcctgtgtaacttttcattctgcacctctgtcccctaagtgccgtacctcatacattatccactagccataagcagccacgacacacttaaagcgtgatgagtctgaattaacatgcactgcaagggcaaaatacggaatgcatttctgtgacttcacaggaaaaacatacggtaagatattttattaatgtttttctactgattacatgctgaaatagcatttgttatatattgagttaatgatgtatattaatattaattttacctgtatctttttactccttttaatttggctactagagaattaaaatgagatgtggctcacattggtggctcacaatatattggacagcagagttctaaggtctaaactgatggatgagcaaattgaaaaaaggatttcaataaaatgacacagggtttcaattaaaacctgacacaggctttaataaaatgagaattgtaaagatttcagccctgttaattagcaccataaaaaccgcaacaatgattaatctgattttttaactgttgtttaataataaacacatatttttaaaatttttaaatatgaaatgtggcaggaaatgctagcactttttcatatttagggagacttcgctgtgatgagggcttctaggtatgtgtgctttatttcttcaggccaggcattttcgaggaaaatgatttgaaaggaagcacaggggagatttctcattctctttcccagaagctgtaggtgagggtttagcgtgctgattccctgaaggagtcataaaataagtgaatccaaagtcccatcaagagcccttgagaggccgggtgtggtggctcacgcctgtaatctcagcactttgggagaccgcgacaggtggatcgctggatgtcaggagctcgagaccagcttggccaacatggtgaaaccttgtctgtagtaaaaatacaaaattagccaggggtggtggtaggcacctgtaatcccaggtacttgggaggctgaggcagtagaatcgcttgaacctgggaagtggaagttgcagtgagccaagataaacaaataaacaaaaagcccttgagaagaaaactctgcaatgggatgcaggggcaggttcaggggtgtggggctgagggtggtgtttgattacctagaagagtgggggaagggattaatagaagagtacagttggttcttaggaaataaaagacaacagccaaatgcgactgaggccaagttttactctctaggctcaagagctccctcaaagacatagtagctagctaaggaaaatttccactgaagcaacaaggaggcgattggggccacatgaactgtggaaatgtagaatatattcaggcttagtccagatgatatggaattgaaaggctttaaatcccatttaaatatgaaatagacatatagagacgcattgtacactagggcaagatcagaaaccaaggtatcatgacaaaatcagacatgcaggtaagaattcattttgataaattccaacttaagattaaatgcatcgttttaacttggctttcagcaggatcgtattctttatcactttattcacttgcctttttcaaaggccaacgtgttgtctttcaaatggaggcccacatagacatcttttgtaacacccaagctatacacaactatgcttctgtaacaataaaccggccgtcagcagggaactcacactgcgaatgaatacatcaaagtgacgaggctttgactgagttgaaagccctgtggaggccttcacggtggagctggacacagttgctagaaagatgaagtgatgcatctggtcagcccaggcacgggtcacccaaaaataccacccagggtaatgaaggaggttgagattgtcttaactgggggcttgaaatgagctaaaagaatgtttgggtttgaaaattgcctctgatgcaaattctgggagagttcccaagacaactgatcatgagacacgagttattagggagaccgctcttctgggcttcccttgctcccggcctacagcagcacctttacatctcctaggcagggggaccatgaaagctcttctagaaccacattttcagatgttctgtcttccaagtcccggctgatatgagcgcctctctctgggttgagattaaccactggcccagcccagctttcctctcagtcccgttctgctgagtattacatctggattctctgtttatctgcagctcgggcatgggttttgaggaaccaactctgacttggtccttgataatttctttattttcaaagaaagagtttgtactgaatatccctaggaggactcacttataagcattgaacatatttttatttatttttaattttaatatttttttgagacagggtctcactctgtcatctaggctgcagtgtagtggtgtgatcatagctcactgcagcatcggcctcctgagttcaacccattctcccacctcagcctcttgagtagctgaaactacaggcatgtgcctagctatttttttaaatataatttatagagacagagtgttgctatgttgcccaagctggtcttgaactcctgatatgaagtgatcctcccatcttggccttttgaagtgttgacattataggcatgagccaccaagccagcctagaaacaatatcttctctattttagatgtaaaaaccgtaaaagaaaaaccctacatgtgctcacacagtttagaaccttaatgtacttatgttcttgaggtattacatattctcccaaagagtagggacaaacttgtctttcataccgactttttcatcaatagctaaaataaagcacacatatccttgcaatgttacatttgaaccacatgtggttagagtcaaaggctctatataaaagaattaaacaaaattaataactatagacaacaatttaaaagacattctgtttcagtaccacctgtacttagatatcaaatacctatatagttggaaaaataaacacatcttattaagcaaatattttaatagtgcaaaacctgtgtggtctttcacgacgtggtttttaacttgtaattcctctgtgacatctaggtttccccaaggcactgtcatattcctgaaatgttttctgctagatcaaagcccaagacaaaatttcaaattacatcaatgaaatgaactattcatatggaactaatctttctataaaaacctcttcgaataaaacatgatttttgaaagtcagataaacccaatttattgacttcattgtgagttttgtcaggatttattccatccacctcattgtacttcttcactatacgataatgaatagttgattgggaaaagactatcctataaattattgccagttacacaaatatgacactgtaaaagtcggtccactaataactcacagtgcatgtcacagaagagcacttctgatgaagtttcatccccatgggctcactcaaaggaaacaatatagtaagcactatttaaaagagaaaataaagtatctatcctgacattgctaaccaaatagccatcttaacataaacagaaacaacctcatgcatggcaagactttacaattatatggatttgtgtgtgatatactccacttcaatgagcaaaaagttatgccacacagagcttaattacatcctatacagcatgttaatagcccatatggcagaacctgggaacatcctaattgaaagtcacttaacatttacaaaggcaatccaagtttaaccagtatgcaatccttgatattcctggctagaaaagacactcttattatcatgaaaaataaatgacaacgttatgtaagatctgatggctcttccgaacatgcttattttcagtttggaacacctgtctcagctttcacttaagtataatgaatctataattaagaatctgttaggattttcatagaatatttagttttgaggaaactgcgttaccatattgtcatattgcaacagcctctgacttggaatacaaaaagaataaaatatataaaaacccatgtgaatacagaaaatcacttgatctttatcagtgtttcccaaacactagttatctataattcctctcctttttccaccttcttgtgtcttacagaacttgtcgtattgactctctctgcaaagcattcgacaattttcttccatttcttcctgtcccaatcccagtcatcgtcacacctattttaatccaagccatcgtcatctttctacggacctcttttcaggttgcttattggcctccctagtttggagcctttctgcaagcctcaccagagagaccttactaaacatcagtgaggtcctgtcacttcctcccaagcatccttccactgcacctcaagttacagcctcatgcctcactcttgattgcaaaactccacgagattttgtcttatctctagccccgtctcacatcaccaaccccatgttcactgtagtggccttcagctcacccattacttctgcacactggtcttctttctgtttcttacatatggcaacacagttccttagggtttttaccccagctgtttcctctgtctacaatcacctttctttttttttaaaaaaatgtatttttccgtaagttactggggtataggtggtatttgtttacatgagcaagttctttagtggagttttatgagaacctggtgcacccatcacccaagcagtgtacactgcactctatttgttgtcttttatccctcgccctcctttcacttttcccccaagtcctcaaagtccattgtatccttcttatgcctttgcatcctcatagcttagctcccacatatgagtgagaaaatacgatgtttggttttccattcctgagctacttcacttattctacaatcacctttccataaccaggtctttctggttactgagaactctgtcaaactataccccttcagagaagtttcaggtttcaacctacaacagtcagaatgagataagtcaataccggttccacatgaattcaggttatctgcagagcccttgccgccaccctgctgttcttgagtatttttcctttgtccctctgtcctgcaccagaacatgattacatgagtttgggagagttgctactcttttccctgctgtaacctccagtacttagaataatgatgggcccctcaggagagctgaagaaaaagatgtagaatgaattaagaattagagatgttctatgatgcaaatgtcctcgtatcttaacatgcttgagaaatatttggttgaaaatcagctttcttcctgtagcagttctcaaaattctcattataccccaattatgtgatttctccaagacaggaatattgaatgaggttttccaacacttctttggccactgaataagttcgttttaagaaagctctttttgaatattaatccgcttagaaaacactgttatgtgaacatctatctacatagatctattgggaaaatgaaggcttttctcctttgaaaaaaaactgatttcaaggaaaattaaaaattttgctcatatgttttttgtttatacatttgttttcctttgttaacaaggtaagtggatttcaggtctaactcttctaataactttttgggctgacttttgacaaatcaccttaattttcttctgtgcccgttttcttgaccctaaagtgaaggagagtaatttctctgatatcatttcatactatatgctccagagtttctcttccatgaagctgatttatgaagtggaacaaggattgtttgaggtaaaatatgtgaaatttctaaaggtgatcatacatgatagagcaaaaatcagcacagttagtcacattacagagcatctggctctggggcaaactaagcgtcagccttcacttgccgaatgattggtcgttggttcacatctctgctcagaggttgctttccctcaaggagacgttacctggaccgcttccaatcagatgatacccaggttctaattatacgttgactactgtgattgttttaacaccatttctttctctaagctctgcattctgtgcaactgagaatcatggagttgtgaagactgttatgtccttagtatctcaaagacctcctggcatgtagaaaccctccaataagttattattgaagaatgattgtttgcaagcaacactggcagaaaaatattgatttaatgctctgccatggccaatatcaatgtgcctaggaattcacactcagaaaacagagagaaaaaaaatgccccaattcctcccagacctgctgaactttgtgtttattaaaatataataattattcaaaagaacttaatctcaagatgaatggatatgcacgccagtaaaatgctaactgaaataaaataattaggagttattaagctctcctttcatgcatgcctaatgacagttttaagtgtgtcttcatcgaggttcactacgttaataaaatctatatttccttcctctcacctaaaattatttcttaagttctttctgagggacagttcacctaggacgattaacacatggtcaccttttccttcaccaaaaaatttctgcttgttggctctgaaggcagcttaatgcgcgaacagggtttgggtgttggaaatgtccagaagaaaggaatcaaatattgagtgtccaataccattcagaattaaatgttaacaatatttcacaaatgctttcacaattcaaaagaaacccaatttatctagagactctacattgatgagtggatagatttttcacaaaagcatgtggaaagttaaataaaaaaaacaaagttttgagagaatactgctcttagttattcctgctcgtcaggggagctgccctggggagctgtggcatgttgcatttcggacagctccatctgtctccttctggaattattaacagcacttgcaaactcgtctttccaacagagacaaatgattcttggaactgccctcacaatgaccaaagctatattaaaattccataaggaaacatccaggagattccttataaacatgatattgaggtactgaagcccacagtgtagatgcttaaaaattaattttggagaacaggctggaggaaaatgttgttttcatatgcctctgtgctcactacagcaatggaatatcccaaatgtcctctctaatattatagcttttcattgcactacttatgggttttccttcaaaaggaatctatgacaaattaaaatctttaccggcaaaggatatatgtttggaatgccaatgaatttactattgaaaaagaataggtttccaaatacagttctcggatgggtagcacaacacatagccatttgggatatttttgctcacacgcgggactgtgaaatgctgcccatcataatctggaaagctactgctatccttgttcatataacatagcatctttgtgattcaggtcatacaatatggtaacccagaaatatcaagacttttaaaataccccccagagattagtcctggaaagtttgcagagtgtattaggttttgtacatttgtgttgccaccatccacattttttggtaaatttttaaaaatctctgtccttctctgcgttgctcttatcactgttaccagcccttcttaatcaagactgggtatctcatgtgtggaatcctgccttatgtgcatgtgggcaaacagtaattctttagggctatttatgggccagcctctgaaaattaagaaaggcaaacagccgtggaggctgagtcacgtgggatggaataagctgtgccctgtccagacctggtacctgaagtcctgcgcttccctgcctgatttcccttattcctgagtacacgggattattttaatctttaccgttaaaacgcaatgatgttccttgttcaaaatatataccgcaaatctcctgtctaaaatatttagttttttctggtgacattttctcaattgaattattttaaactactatatttctctgaattgccttaattataaagcgattatgtaagataagattttttgtttcttgttctaaatgtgtatccacatttatctgttgcatagcatcacttattttaaactatttttgtcttattgtatatgtctgaagcaaaatcatttcaagacgtaaaaaaacaaaaacagaaataacacagcaatgatggcatgggttcttgaaggagtcgaagatttcaagtacttacaacgaaactgagattcaaggaccgtggacactatagattcatgactgtatttcagaacgaaacaaaaataggacttacaccatgatgacttctgataactaaaatatgatcagatttttaactttccatctgatccagattagaaataccttcgccttattaaaaataaaataaaaatcaatttgtatggttatagaaacacgtagaaacatctatttggagaatccaagaagaaaacccatattgcataagcaacacaaataggagtacgtttccttcaataaaattattaaatattttaacaagtgaatatcaataattgagaaatatagacactgttttctttttatattaaagtgtcagctgctaagttgatactataaagtagtgagggctttccatttcatggcagctgtttgaatgtttctgatttttatttttattttttcaaaaacaacttcccactacagggagcatgtcaaacgatcaacttcctctctttaaaatttcaggaaagtatataatcactttaatttgtccaaagaatttttaatcaagaatttttttgtccgtactgtaattctaaccatattacacatgttgataatatctgcattttgtcattacaacactgatatctgtttattttatgtttcagatttctattcggaaaacattattctaagcctctgggccattttatatacaacggcatttcctcacctcctaaaataatttactgcattcaactccttttatattttaattttgccatattttatatcataaatatgacagtttacaaatcatttattaatgctatcttattttcctactataacaaagccctttcctcattcatattcagaatttttttcaatgaagaagcactttttttgtgtcctaagtggtaatcaacttttttgtttttcataattttgatgatactttgaacaataatttctttaaaacacatggaagtgtctctcacaggatggtgtttgtatgggacaactttaaaaataaattatccttttcttcaatctttctgactggttacatatatataaggtctatgttggcacttacatggataatttttaaaatgtggccctggttctcttctcttggtaaacttggaaaagagaggctcattaaagataaaacaaaatggttaaacaatataagacgtttttctttaactcccaaactttgatttgaagtgtagttgtaaacaccaagtctataatcctattttgtgaaatatcaaatttatgtattattggttggttgttgctgttgttattctttcaattcacctttcctatacggtttgaacaccacttttcaggtgaattaaggatttaaatatttaactcttgacacggtcactaatgtaaagtttggtcactactgaaaaaatattatactttgatttcctttcttaaaattgtttttgttttccttacatttctaattgtcttcaattttactattgctttatctatatatacctattttttacctattctatcaacagttattttaaaattttttttcttttattttgtaaagaattgctcctaaggccccctctgtccatatattctcatctgtatctagggctcttccaactgacattccatgacttccctttaccctctgtggatgtggcttactcactgcttataggtaaggtggggactgagtttaaccttgtctgcagttaatcaaccaattgtgcctgcacagtaaaaccccaaataccccctggaagtggggcagactcactgggcttccccggcaggcagtgctccatgtgtgttgttccaggtcagtacctcggtacttaaggggagaaacggggtagaagctgcactgtgcgtctcttccaaaactggctgatttaaatgtatcctggctgtattacaaatatataaatgtaacaaatgtgaaggtaatacgtttcagagagttctttgagtctttttagtaaattatcaaacctgatggtggtttagggatccacagaacgtgtagttggtgtcaaaagtcttgggcagattagaaatttggacggctccattctcggaggtggagccaagatggcggaataggaagagctcaaggcaacctacaaaatgggagaaaattttcacaacctactcatctgacaaagggctaatatccagaatctacaatgaactccaacaaatttacaagaaaaaaacaaacaaccccatcaaaaagtgggtgaaggacatgaacagacacttctcaaaagaagacatttaggcagtcaaaaaacacatgaaaaaatgctcatcatcactggccatcagagaaatgcaagtcaaaaccacaatgagacaccatctcccaccagttagaatggcgatcattaaaaagtcaggaaacaacaggtgctggagaggatgtagagaaataggaacacttttacactgttggtgggactgtaaactagtccaaccattgtggaagtcagtgtggcgattcctcagggatctagaactagaaataccatttgacccagccatcccattactgggtatatacccaaaggattataaatcatgctgctataaagacacatgcacacatatgtttactgcggcactattcacaatagcaaagacttggaaccatcccaaatgtccaacaacgacagactggattaagaaactgtggtccatatacaccatggaatactacgcagccataaaaaatgatgagttcatgtcctttgtagggacatggatgaaagtggaaaccatcattctcagcaaactaccgccaggacaaaaaaccaaacaccacatgttctcactcatagctgggaattgaacaatgagaacacatggacacaggaaagggaacatcgcacctcagggactgttgtggggagcggggagggatagcattaggagatatgcctaatgctaaatgacgagttaatgggtgcagcacaccaacatggcacatgtatacatatgtaacaaacctgcacattgtgcacatgtaccctgaaacttaaagtataataaaattaacaaaaaaaaaaaaaaagaaatttggatggctccacccttaaccccaccatttggctaactctgggtgattgtgtgagttcctaagagtaatttttcagtctaggagttcttctgttccttagttcttctgtacctttagtgcctctgtaccattcgttttttccatgaaggctttgataagacttttttcaacatattttctccgtaggaacaatatgggtccaggaatagaacttttggattaagaccttgactctcttattatttctataagattctatcatttctactgtcctcattttctgtttcattagctttttctaattgtttattgattttctatgtctctaatttcttaattatctttttaaacttttacctatgtaaaaccacctcctatcctttgaaaggtgtgaagttatttttttcttactatattcattgtctcagtttattatagatttttccacttgtttattttgatcatgtcatcggacattctttaaatatctttaatatttggttatctgctcttatttcacaatgtggcattaaaaaactgattgaagcttgtaacaagtcaaagcagtttgccagttttgggtttacttgacaaagatctatgaggaactagctatatccttgtgggaatcccaagggtctaaatacaaagatgttttcttaggtgatggaaaatttctccaatgcagaaatctccaatttctgcattaatagggaaactgtagaggagatgtagcagagattgttgctgtatatactaattttaagccacatcttaccctttagagcaagaactaggatggagtgagtcagaaaagtggtgatattgaagcttggtctttgaagcatatttaagtaatttatatttactaaatggtatttgacctgaatcaaattacacattcacaacatgagacacgtgagttcctgtaataacctttgttcaatatggttagaattgggaaaataaacagattagcagagtttcaagagacaatgaaattcagggcaaaaaaatgtattttctcactgcacaatcttagtgttttatttatttcttctcacagtttaaataattttataactcaattaaatatgttaatatttaaatgttaagtatttaatataacttgactaaagcagttctttaacatttttttttcaggacattattttcctagttaaatctcaatgcactaaagttggcaaaaataaaaagttttataaaagaaaacagaactaagatccttaattagctactttaagtgaagttactcccttcttggtggccaggctgggtcaattgatgcccatgggtgattttcaacatgaagagctaggaagaacgctaccattgagtagattaccattcagtattaaatgcaaaaattgaaagtgtagtcactaaaggaaaaaaaaaaatctgttcacatcagtttcacagtctgtggtcaaagaaaacattggccaattattccagaatagatgtgcatagctaaagcttattcaaccctttgtaatatcattttattagatagatgaatctcttcaacaacagaagaaaattagattgcaactagtattcatttctacatcagagccccaggctggagctatattaagccactaaatggtctgcagaaaattgaagtagcatgcactttgatctcaaaggactgcctacgtcacatatgacaggcatttataagagaagagatgtcctcctgggacctaatgctgaacagcagaaacaagatgtgagatcctgaggatgcagagacatttaaaaaacaacacagcccccaagataacattaccaataatgatacttgaaatgactgacaagtaagtttagaagtcttaatagaaattctagcgtttgtggaattttctgcggattgtaagaaaatcccatcctacataggcacagggatgtctgctcttgagtaggaagagtaatagaggttgagaacacataactaccctctccttaaaatcctcctggctcctcccagtttatcagttccatctttgttttctcagactgcactatccactgacaaagaaccagtgcttccctctctatagtcgcaggaaattctattgccacagcttcattccaacctcacaggactagttttcattttcttctgtcacttggaaatgcacagatgaatatactgtttttcaaataaatgtcctttaatttatttcttatttttcatgagttgaaatctaaactggcttcttggacttctgatgccctccccaactaattatcataaataaatatgtatgtattgattagtgtgacttggaaacggttgtagggctttgggaaagctgtagcagaaactggaatttctaacttgggattagaaaacagccgcaaatatcagagtcctatactaagtattgcagaatacaaatgaatcagacacagaccctgccttcctatggatagataactatgacagaaatatatagtacaacctgcagtcagaaattcacaagtctgggcataatggctcacacctgtaacccccaacactttgggaggcaaggcaggaggattgcttgagtccagtagttccagaccagcctgggtgatgtcgtgagacactgtctctactatatatacgcactatatatatagcctatatatatagagagagactatatatagagggagtgtaagagtatagactatacatatataggctatattatattatatatagcctatagatatatagcctaggctatatataatataatatagcctatatatatagtctatatatgtactctctgtagatatatatagtctctctatatatctatagtccctctctatataaatatttatatataataaataaattaatatataataaattaatattatatagtataatatataataaattaatattatatagtataatatataataaatattatatagtataatatataataaattaatattatatagtataatatataataaatattatatagtataatatataataaattgatattatatagtataatatataataattatatatactattaatatataatattaattatatatactattatatatactattaattatatataatattaattataatatataataatatatactctagatatgtatagtctctctatttatatataataaaaaattaatatctataaattaatattatatataatatattatatatcatataattataatattatatatttatatgttgatattatatatatttattatatatataaaatatatagcctatagatatatagcctaggctatatataatataatatagcctatatatatagtctatatgtatactctctctagatatatatagtctatatatctatagtccctctctctatatatttatatataataaataaattaatatgtaataaattaatatatagtataatatataattatatatactattaatatatattacttatatatactattaatatataatattaattatatatactattatatatactattaatatatattaattatatatactattaattagaatatataatattaatatatactctctctagatatacagtctccatatatatttatatataataaaaaataaatatatataataaattaatattatatattataatataatatattatatattatataattatattatatatttatatattaatatatatatttatatagaatataaatatatgttaagattttatatattatatatatattataatatataatattaatttattatatatattaatatgatatatatagttgcccactgcactccagcctgggcaacaagagtgacacttcaactcagaaaaaaaaaaaaaagaatctatctccttcatttgggagctgttgtggagaatgaacaagtctctttaaagcacttcgcttgctgttaaacccatgagtgctgccactgctcagagagtttatatttgttcccagagaagctggtggccaaactagagaccaaagtgcacagctaaatggagggaacattatggcctcttctacgggcggcagtttctaaggatcagaacagccttttgaggtagtaggtacctagaaggaattcacagagatgcagtgatcttctgctctggatatttggagactgaagcattgggtgagatgttgaaggatgcatttaaaggtcatgtcaaagctaagctcctaagagtcctatgtttctaggaatcctctgggttgattttttaatatataatagctctgcctatactttcaatgaatattttcttaattgttaaaaagacctattatgaacagcttgcttcctttatacttaatgttttctcaacatgcctaagctatcaaagggccttcataaagtaactaaatgcttctgtatgtttgaacctttgaaaaaaaaagagacagcataaattagccaaatggtgaaacagatgttcaagaatggcaaagctcacgcaggaggctgaggtgccaactagcatctcgctgtcctgttaacagaaatatccttgaaaactctagtgcacaaatatgctgagggagaataatagtgtgtaaataagcaaaatagataacgttgtactttattttattgtgttagtagcaagagtacctcttgccctgaacataataggcattcaataaatcattgactgaataaaaaatataggcaaaacaaaacggtagaggaaatgcattcatgtaattcaatcaaaatgcaagcatgcctccttatttcaagttaaaacatgtgagtgtatgtataggtgtgagtttatgatatatctgtgtgtgtgcacttgctagtgtataggatattgaggtcactatacagtgacctcaattcttttttttaattttttttttttttttgacacggaatctatctggctctgtcgtgtaggctggagttcagtggcaggatctcagttcactgcaacgtccgcctcctgggttcaagcaattctcctgtctcaaccttccaagtagctgggcgcctgccactacgtacaggcgcctgtgactacgcccattaatttttgtatttttagtagagacgaggtttcaccatatcggtcaggctggtctcgaactcctgaactcaggtgatcctcctgcctcggcctcccaaagtgctcagattacaggcatgaaccactgcagctgtccggtgatctcaattctttggtacatgagtcttagggcaaaattccaggacaaacactaaactacactgattgatgttaaatcaagtattaaatagaacttttccaggaagcctggcactattggccccctcatgagggtactcatcgataaaatggtggaaattgtgtttttatgtatgtaatacaaaggaattccatacaatttcaataaacttgtttggaaaggtttatattgaaaagttttaaatagttcatgagcttgattttgaactatctttaaaactaaattaaaaaatgcatagattggcaaaataaattggcatcaagtgcatttttggacttctttaaccatgctttcgttatgtggttctcaacctcaagcaatgtgtttgattgcttttatggagaaaagaagaaaacaacaaaacaatctttgacattctttcacttgcaagaccaagcactgcattccccattcccttttcattgctcttctatgatttgtggggatgtctagggacttgtaaaattccacaaagcacatatatcaattaaattgtttatcacaaaatcaccaaatattagcactagaaaggattttagaactggatcctagtttttcaggtcacacatttttagaggttcaaataaaaaaaaaccatgaatatgattctaattttagaacctagtgattataatatataatatcaaaactacaatagttccctcctagctttaactgagctacattaataacatccacagacaatgaaaattagtaaatacgtgcaaatcagcccatgatctgtgttcaaagcaccgagactttgcatcaagctagcagctcctcaagggtcctggcccttgggttggccacactggccacggcaaagcctttcccatgggatgatcttcccctagctgatcctccaaaaagaaaaggaaagttactgcttccaaaagcagtttttttccatcgtgttgcagcatcaatttgtatatcgagttaaaagctcctttctttctaatgcatacccttgttcttaattctgatagttaataaaacacacactaaatgtaactggaaaacacacatgccttcattctgcctaattcaaccccgatctcttctccttgtcaaacaacctcaggttttcttaaaaactcgttttcctagcatcattgtaatattcccattttccaagcctcttgtagaatcatctgcttgtccatttctctgttaaacattcaaaactaattcccaatcttcttatgaggttctttcacttttcattccagtagtttctattggtacactctgactcaattaggttttagatacccatatcaataccactaataatgtatacttaaacaaaaatcctgacagttggctgtgcatgtcttatagtctcaagactatattttaaacagatgttaaatgattttattctcattgttcattactagtattaaatattttttggctaaatttctagggaagaagtgggttccaattgtagatctaggtcagaaattgtaaatcctggggacacagtagtagaaataacacataaatctcttgcctatatggaagttacatcaagaagatgttgacagctagagtttctattttttagaacactcataaattatgttgcatttcaaagagcatttgaaactaaaaccaaactaatgagaaacctgcaaaaaatgtgtcaagattaaaattgggaaacagaaaaaaaaagaagagttaatatttgatttcaaaactgtcttttaaaaagttggaatgtcagtgttcaaaaatacattagcagatggctgctacaataaatgggaatataggattaatatcatttgtttcacaaacttgacattacaaataaaaatataaaattttaaaaacgcactgaagatgttcctagaattgaaactacaaaaagtcaacattagctcactcaattgtttagtttgctcagtttgatttctaaagcaaccctgaaaagtaaggattattagtattcacattttgcacatgataaatgttgtaatgagtttctatttcagtatcgttttctctttttatttattctttagagagtttgaataaatgattccatagcacatctaatggaatcaattctcaatttttcactgtcatggcttgtaaattgtttgtttccttgaaaaccttgctttcccatttttttgtaattaacacaaaatcatctgctgataaactactccactaaaaatactttcgttgtttgttaatgagtttatctttttatactaatctttacctcattgaacgaaatcgtttgaagactttatttactgaatatttattgtgtgcttacagtatgtaattataagcaaagatatttcagatatttaaagtcaaagttggtttcagagtaattaagaataacagccagccaaagatcaaaatgacaaattacactcggactttgtgtacatgaaacatgagacagatatgagaaaaatgtgaaactatataaaagtaaaaaaaaaacaagttattcacgatgcttttatgtcaatgcatccagttggaagtttaatatttgaatattttaaagagaaatttgttataggataccatggaatgcattttcaaagagacaggccacggagtgagtgacgggagcccacagtgggtggaacacagacctagtttgagcactgaaaggaggtggctggtcttcgggaaatgttttaaagcatttgattctcagatccaccatctgcaaaatgtgcatgaaagtaatacttccaaggcttgttttaggaatcaaatggatataatgtaccttcgaaagtaaagagggacagatattgtgagtacaatttagagtaacgtaatttacacccagcagaactttccattgcatgcgcacaaggttatctgagaacaatgatgaggaactcagaaaatgtactcaaacggccaaatgtctagcatccagcactgataatatgtagtcattgttattacaatggcacaatgttaatataattaaatttccatcccactctcaacaaggccatctaaacctgcccctcctaccatttttattatatacataagaatagtactttaaaaattttaaaaagacaatattggcattaacttagaaaggcttatttttatttcctctttaagaagggtgttgaagaatgagtctggcttgtggctaaaatctctgttgagagcaagttcctgacggatgggtgggtgatatttagtgagtcaaggaaaattaataacagcattggtggatcaatttcaagtcaatgacaatacttcaggaagtcccagaagttctatctggtagacacacatacacctcactcaccaacaaattattgacaaagaataattctagaacctttacactatgatccataggaggtccagggagttgatgtatggattcagagagagcaatctctttggtaatgtgactaaccgtaacttcatcatcttttagcagaattgtcacagagggaaaaattggatttttaggaaagtaataactagaggccaatgtcatttgaaaaggcaagggggtgtcctcccatctgcagatggaaggagaacggtgggtatgcagctggaaattcactatttgaattcatcattgtcgggaactgcagcctcactagttttatttctgataaactgaaatacagatcttccttgacaatgaggtcatgtgacctcagaacttatgagcgaaacatactctgccacttctgttcatagaagaatcagaacagattttgtttttgtttttgtcttttgaagggaaaaatgtctcttaaaatttaaaactaaagttttttctaaaattcttgtcaatatttgtctgtgcatttaaaaactgccatcagaatgcttgatttttattttaatgaattaagattttaaagatgtgatatgcagatactgcacaaactttaaaagttaacaaaggttattgatgtataattttataacacaataaaggtctcctgtgattagactttcatattatagtttaaaatgcatacatatatttagaagcaagaagtatcaactataaggcaaatctgtagacattgaattgaaggcaggaagacagtttatgggaattagaaaacacataccgttaggaaaatagtgcaactatgcatctcctaacaatggagatacattttgagaaacacatagtttgctgatttgtccttgtgcaaatatcgtagagtgaactcacagaaacctaggtggactagcctaccacacactgaggctctacgatacagcatgttgctcctggaccacacacctgtactgcatgggactgccctgaatactgaaggcaatggttacacagtgatagatatctatgtatctaagcatatctaaccacagaaaaggtacagctgaaaaatcagcataaaagatagaaaatgctacacctgtacagggtacttgccatgaatggagcttgcaggaccagaagttgctctgggtgtcagtgaacgagtgattatgaaggcctaggacatctcagtacactactgcgggatctataaatgcagtgtacttaggcacactaaattcatttaaacatttttttgtcttcaataataagttaactttagcttactgtaacattttgtattttataaagtttttgatttttcatcttttttactcttacaataacacatagctcagaacatactttgtacagctgtataaaatatcttatttctttatatttttattctatgtgctttcttctatttaattttttttttactttctatacttcttttgttaaaaatgaagacacaaacacacacgttgtcctaggcctaaacagtgatcatcaatatcactatcttccaccttcacatcctgtcccactgcaggctcctcaggggcagtagtacccatggagccgtcacctcctatgagaacaatgccttctggacatcttctgaaagagctgcctaagactgctttacagttaaaattaaaaaaaaaataataagcagcagtagacttctataataaaaagtatagtaattatataaaccagtaccatggttgtttatgatcaggatcaagcattatgcatggtacataagtgtatgtgctaggcttttatataacacactatacgtttgttgccaccagcatcatcacagatacgtccacaatgcaccacgctatggcattatgatcgctaccatgtcaataggtgataggaatattccagctccatgagaatcttatccaaccacctttatttacatggtccatagctgattaaaatgtctttatgtggtgcatgactctacatgtgaaatagataaacatatgtaagttttgattagccccaactgatcaagaagatgacagttactcaaaataaccttcctctcagttttttcacgtgtgaaactcagataagcatagaaagtatttcacaggaatggtgggtggattaattgggctagagcatatgaaatgtttgactttagattaagttgacatttaaaataaatattcacaaacattagcagttattatcattaactcaccttatttctttagcctaaggatttatttaattatttatttagtttgagatggagtttctctctgtcgcccaggctggagtgcagtggtgcaaccttgactcactgcaacctcgactcactgcaacctctgcctctctggttctagcgattctcctgtctcagcctcccaagtagctgggattacaggtgcctgccaccacgtctggctaattttttgtatatttagtgcagacagggtttcatcatgttggccaagctggtctcaaactcctgaccttaggtgatccacccgccctggcctcccaaagtgctgtgattacagccgtgagccactgcgcctggccccaggatttactttttaaatatgaattttccagatccacagcagatcagatgatgcctcttagcaatctagtctcaggtttagaagcccttccagggtgggggaaggcaggatcctaagaggacctccatgctcctgaggtctcctcctcttgcaagtgggcaggacctgtgactggcttttaaccaataatgcctgaaccttacaggtggcgcggtgtcactcttaccattatgttacattacagggcaaaggtgaagacattttgcagatgtagaaaggtccctaatcagttgatttttaagttaatccaaaggcagttgatttgggagaacctgacctacttagaggaacccttaaaagtgttccaagtcagagaaggaagcagaagtggtcccctcctgctggcctcccggaaggcactgcccagtgtggggagggacagttggctgcgagcagtgggcagttttggggtcctgagcatctcagccctatacttgcaaggagctgagttccgccaacatcaatatgagtatggaagataattccagcctaaggtgagatcacagactgaaggagtccttgactgctgcttcttgaggccctgagagaagactggggtaaggggtccttgattccagaccgatggagccccgagaaaacacggatgcactgccttcagctgctgcatttctggtcatttgctactcagccatggaaaaactaatacagaatgcttccttatagcaagtctcaatccctgacactgcagttccagctccatatgttcctttttatcataagtgattaggaaatatagttgggtgccaataattgcacatcaaacctcatcttgactgatttagatgtatttgctcccattatgcgctccctatagctagtctgacttttcaactctatccgttttctctccttataaataaaggtaagtgcatattttcttggcttcaaaacaaccaatgatttttatttattatttatttattcatctctattctgtgtatcttggatggggcacttctttcctgacacatgtttttattttgtctaatcttcttaccatcctggtgatatttctctctctctctctctctctaaatatatatacttacttagtgctcatattgaatttatttttgctgtgactgctgtatgtggtggatgagaagttggcattttttacaggcaaaagccaatgtcaggaacaatcagaagttgtcaggacattgatcctgcccttaatacctgcaaatcctcagctggacccaagtgttctgcccaacaggggagctcattctactgcgatcccactaacaacagagatcaccacatcaaaaggagcaatcttattaaagagagtaactagaaaaagactcattttttttctcagccttctctaggcatagttggtgttttttaaaacacaattaggagttatttcaactaatagttacttaagttctctgagtacttaattcagttaattgatctggatttatactttccgattttatagcaaaagcctgagaagttacttaatttactcaataccactttaatttcacctttgtgctgctccttgtaaatatgtactttgaactgctcaatttccctcactgttctaaagtgcagagaatagatggaatttaattttaaagccagatttttcatttcagatcctattatgctccttgcaccatctgtgtgatctgatctctgaaaatgcaatggtcttttaggtggtcctgaactacatgtgtctaattataattgtcaaatatttagtactgtagaaaaaaatgattagcagcgattttaaagaaaaagtggtactttatgaaaggatgtttataaagcacacatttttttcagtccagaaatgctaaagagtgatataaagaagatacatatctagatatcatatacatatatcatatatatatgatatatatatgtatatactattgcaaaaatatactcctagttaatcttataataatggactttcatacagaaggttctctgctcatataaacttaaacttagtggcatgcagttttggccctcaatatacaagattccatttaacagttgaagggatacttttgtaacagaaagttacactgaaagacaaggaagcctaggatgataaatggaggtgtcttaaacgatgacattaacttagtttgaatgaaaaatcaacctgggaatggttgatgagaaaatgatggaaaagaggaataaaacgaaacaaaaccacaggaacacgggtgcatgtgaatgtgcacagacaaagatacagggcggactgggaaggaagtttctgcaccagaatttggggagatgaagtggagagaggtggggtccactacccgcagctgccatcacaggcgccaaggaaggacggacgaaagggagtccttgcttaaatgtcagaaagtaaccctgctccttctggcggttactccttttagttacatctgaattggaatccatcaaataaatgagtaaatgagtagctcgacggttagaatgacgacttcagcagaaattggtatctgcaattcaaatgagttcagctaatgctccacatgggaaaagaacagtgattcctgggcctgtctgctggagcctacctggggaacaaggtcgaagtccccagggaggggtcgattttagtgatgttgtcaactgctgaaatcaggatcggcacaggaaacacagggtgtaaactcaatctttatgaagctcttgtacaaatatcttttgagaaatgatatgtttttaaagatgatattgtgagacagagtatatctttttttgtttggtttttgtttttgtgatggagtctcgctctgtcgcccaggctgtagtacagtggcgcaatctcagcttcctgcaacctccacctcccagttcaagcaattctccagcctcagcctcccaagtagctgggaattacaggcacccactaccatgctcggctaatttgtgtatttttagtttcacgatgttggtctcaaacttctgacctcaggtgatccaccagcctcagcctctcaaagtgttgggattacaggcatgagccactgcacccagcaaagagtatatctttttgatacatttgggcgatgtcgccattcttagggcatatcccttatgaatttcaagtgtctgctgtataggcaaattttgagactgtttacacttttctttatatcaaaggctccaaacaaaagaataaaaaaccaataggtaagtccaaagatagaatcaatatgtgcacagtgttctctattttggtttcaatagctttgttttccatagggtctcacccctgactctttctactatccttgccttttctctttgtcctgtaagcactgacactgaattcaactcctcaaaattcgcattaagcctggcatggtggctcaggcctttaattccagcattttggaaggctgaggcaggcagataacttgaggtcaagagttcaagaccggcttggccaacatggcaaaaccccatctctattatggatacaaaaattagccgggcatgatggctctcacctgttttcccagctacttaggaagctgaggcaggagaataacttgaacctggggggcggaggttgaggtgagccaagatcgcaccactgcactccagcctgggtgacagagtgcgactctgtctcaaaaaataaatataaataaacataaaaaaataaaacaataaaaaaattgaaattcgcatttatacacatcacaggggtgtgccttagtagtgtgtgaaagtccagtcaaaggaacaaagctcaaaagttactgaaggataaaaaatgatagatactctacagactcaagaaagaatttatttcagcattattatcacaggaaacagagtttaaagttttctaatttaaaagaaataagaattacttcttttaacttgttgttatataaaataacagatgagtataataagtgcttcagcttagataaatatctatgtgtttttcctgcagtgatgctcacataacaatttgtagaaatgaatgtagaaggaatatttcaaatctatttaggtataattctagatatcattaaagatgaattgttttccatgtaaaataagatttctgaggagctaatttgtgacaggatatattatgatatcagttttcaaagcatgagcctgctcattatgctagaaggtagaatatttgaaataatgaatttgcatctagacaagggtgcatatcagggcaacacaaagtctttagggactggtcttttcatattgacattacacacataaaagtgggaaattccaacttgatagcccatccattccccaaatggccatccctgaaccacttttgttatctcttttggcatggacatatgtagcactaccaatttctcagtgctgagtattgcacttctactcatcaattatctcaagggaaaaagtacaaaaagaaagacctagtgtcttgagactttttggctctgtttgatcaggtggtccctgaaaggtgagcctctgcaccttgagcagcaactccctgctgcaggccaagggagggcagggttgtctctactttcactggagaaaaaaacatccattgctaacttaagctttaggtgatagacaataagaaacaaagaaaagggtgaatagcagaagaaaagagaaaaaagcagaagataaataattaaaggaaagagagagaacaagaaggtgaggaatgaagagggaatgtataaggaagtgaccacaagtcaggtgtgagtagaacacgtggttctaaggatgagagactgagggcgccaggagggtcgggtgggagcagacatggccatgcaaagccagtgggctccatggatcagagattctggcggggtagaagtactgggggcctgagcattgaagaatatgtgagctagagagatagcaggttagagagaataattcataaaactgagagcatggaggggctgcaatcaccggtgaggacaagttccctggacctgtatgaaaaataagaatggttgaggcagactggaggagatctttgcagaaaaggaattcaagaaacagaggctcaggttgttgcaaaaaccatcgatacaaatactctataagaatacttgattctacaagaatctagtggaagtacggagagtatgtccctaaattcaaggactgggaatggaggcgcaggaacatgcaccagatgtggggaggtggtaaccatcctgtaggcagtggatgcagcgaactcctgccccagaatcagaggtggggtttgtagggagcaagggagaatggcccgaaggaagcagtgcaggataagggacaccctctctactcccagccaagtggatgagcatgtacagtgaaccacactcccctgtgctgctggtcaagacgtcgggaagagggtagggctgcagggctgcattcagagaataagctgggatatagaagatgctgacagttgacgataaattccagaaaacatagtagatggtgttagggattgaggaaggtgggaggagggatggagtagaggacttactcgtgtcagctatctcagcattcacaaaagcagaatcctggcttcatcaaagtgaccaaggggaaactgaggcaggccaagatgaatggtgatgggggtggggaggagcctttggaggctgtgagggacgggagagatggagggtcaggtaagcgtctgcatctcccgctgcacaggtttgtaggatccattccagcctcttctgtctcctccaagcgcacgcttcaacaattctccgctttctgtaacccaccagggattcctctcagcagaatcaatccctccagcatccacgcaggttcctatttctctcattttaaaatattttatcttgatcccaccttcctcactaaatattgctccatttatttgcaccgctttatggcaaggctccccaagagtgttcttgacttgacatcacctcgtccccaacatccaactacatctcccgtcctcatgtcatcagtcgagcaacccacgtcactccatccaatgcctgccaccctgacctcatcattcttgatccaaaagcagcagtggcagcaggtggctgagcccgcgtcccttggcttcaaggacactcctctgagatgctgcttcccttccttcacgattgcatgttttcagtcttctttgttggttcttccttttggggattcattcctgaggctcaggagaaagctgtgagttttctttgtgatcttcataccctgatcaatttttcttctcacctgacacttattatttcataacatgctccacaatttactttaaaaaggtattgttatgtaatgtaatgcattggtatagcacgctctataatttactttaaaaatgtattttcttatttactcccaggaaatggtaaactctgtgaaggcaaggatctttgtctacgttgttcacagacacttctcaagcatcaatatgactgccttgttactagaagatgctcaatcaatatttatgtaagaaagtgattatgaaaaaaataagttaaataaaaaagaaggcacttatgaaaaaagaaggagaccttgtgcccctgtgagcaatgctcctccgaaggaccatcttccctagtgtagaaggtggcagtgtgcagttggataagcctcagtaaagaaaccacctcggggtggggggagcagggaaggacagcattaggagatatacctaatgctaaatgacgagttactgggtgcagcacaccaacatggcacatgtatacatatgtaacaaacctgcacattgtgcacatgtaccctaaaacttaatatattatactttaatatattaatatattatactttaatatattaatacattaaagtataatatattaatatattaaagtataatatattaatatattaaatatatcatgtcaatatatttatatatttaatatatgatacataacatataaaatattataaatatattaaatataatatactaaagtatatgtatattatatttagcatataatatactaaagaaaaattacattatactttatatagttatatattatacttatatatataaactctattaaagtataataataataaaaaaaaaaaaacacgtcttggaaatggaccaattctcatgctttgggaacacttaaaacatgtgaaactttcttaaaatctcaggagtaatacatttaactccaaaatatgatcaataattcttgtaaggtgaaattttagtagtgtgcactgccctttttattttgtagtcttttttcagataaattcttttccttttgattttaagaacacagataatgaattaaagtatcatattttcagtgactttttaatgctactgtttaagaatatccaaacagtacaacttcaaaattacttggcacacgttatagctgtattaacttttgagatacagataatacaggcatagtggcttaactgcacgggttatgggcagtttcatttctgcttacttagcttttctatctccctgcactggaactccctcacccaaggagattcctaaatctggtagctccattgtcaggccttatgatatagaatctggacaatgtggaagagagggggatggagagtgggcgagaagggagtcgggaagatgagacagcgggggaaatgagtaagagaaactccagagggggtaaaaaagaaaaaaaaaagatcgattaagaagtggtgatcaaaattcatatcgagctgttgattataatattactaaacataacaaaaacagggaattgttaaatcaattctaatccatttcagagtaaaatattatatggacattacaattcactcgcaaagcatttctaacatgtaacaatgttgagaacgtgatgctcaatggaaaaacatagcatacatacacacaaatgtccaggcccagtaatccatacagccatacacattcggaaataaacacaaaaacatgcatatgcagagagcttgagagaaatgagaataccccaaaatatcaagagtatttacctactactcttgaagctatggttttaaatatttttctgtactctctattttcataatgtttctaattaagacaaattactttcaatataacaaagatgtattattaaaactaatggacaaggctgcgacagctattttgtaaaagaagaaataaccatagatttttactatattgcatacaaaaatctgtctttgcaatttaaacttgaggcattaaaaattatctatattttttcatccagaaggaaatacactcacatcctaattttaatttgctagtctgaacaacagaacaaaataaaaacaacaaaaataaaagcatattctataaaaaacaaaaaagtttaaatatcagaaattctattttcatggtgaaatgtgctagttatgaagatataagctcatatgtcaaaaaacttgttttttaatcgccatgttgccactgtaggcattaatgagtttaacagaaatactgattaactgagtttcagttggtacaatgccagatgactgagtatgctaattcctatgacagtttactgcttgaaacatgaatttaattttcctgacttcattaatcataactgttatttaccatataacagcgtaaccattttcttctactgagaaaatttcattttcatgggtcatgcgatgtgaaatcctagagtctgctgactttctgagtaaagacaagctttctgtagaatttttactagtagggtattacgtaaacatctttgatttagagttcaactgcatttattatgacactttggaaacattgtcttattttcttgctttatacttgcattgccaaatctgtacgggtgagataaatattgaatcccagaagcatctccctactactgagtttcatgatatctgtcagtattaatcaatttttttttgttttttatatctagacaaacattaccaaacttttatgtcattcacatcatactgtggaatggtttggatctgtgttcccacctaaatctcgtattaaaatgtaattcccagtgctggagacggggcttggtgggaggtgactggattgtggaggtggtttgtaatggtttagcaccatcctcccagtgctgttctcatgatagagttctcataaaagctgtttgtgtagcacctgctctctctcttcttcctacttggcccatgtaagacacacctgcttccgcttcatcttccgccatgattgtaagtttcttgaggctgccccagaagctgctatgcttcctgtacagcccgcagaaccgtgagccaattaaacctcttttctttataaattacccagtttctgctacttctttatagcaatgcaagaacagacgaatacatactactcctaacatgctgccctatgagttcttaattggtgaggaggagaactgcatgaggatcaaatggaaatcacgtaataaatgcaacgactgtccacatcatgcggcactggggcctgagtatggcagactgtattctaatttgccatattttatagtccttttctatggtgcccctccctgcagcagcagtaaacgtttgcaccccagggaactcctaagtgcccacatggccagtgaaagctgggaagatagggtatgctgtttcctcaaaaatctttcaaagcctgtgtttcctttgccatggtgtctttgtctctgaaggagactgagcatattacagatacaggctactccctcaggctggggcccaaagttaacagaacaggcaactgagccacagcagatccagcatggacatgagtcatgaaatgaacacttgtaactactcagactggaggtggtttgctaccacagtgtagcctagctatcctgacaggtacaaagaatcaagtagaatttggaattttttttatttgcacagagaaatttttgtaatggcatggcaatgattagaaatatatatcgagggcttcttgtatatcccacacttacttcaggaaaaaaaaaattaaaaatgactaagacacagctctttagtcataaaagtaactaagacaaagttgtctacgaagttagtgtaaaatgatgggataattacatgggcttcatgaaaaaagtgccaaagttgtacaggagggagtaattaattgatacaacctaggtggtagagttacaagcaatatttacaaatggagtaatctttaaactgggcctttagcattaggagggtttttcctaattagggaggtgagaaagacctggcaagttaaacaaaactacacaaacaaagctcctaagatttaaagagattggcctatatttggaataacaagtgaaaaacaaaaactgtgatggtaaatccaagccagatgggaccttggagaacttctggacaaatatcccacctatatatatgaggatacctaagtccagaaatagtagatgatttgcttaatattactccactggaaatggcagagtcgtcttccacacctgttctgtttctacgctgtgtagacgtgaggtttgtggtggggccaggtggagttcacagagcagagggtggggacacagatggtccgaatgagtggaattttaatacacttcttagattcttcataatcttcaaataccaggtgtgatgatccatttacaaagacagtttttgacagagcttctataggtaaaaatgtgaagagagatgcaatgggggaaaaggatacaacaccaggccagagtagaaaagagcttattcttttataaaatacctagagttacctttgctgagtgagagattacgtgatatgtaacagggattgcttccgtccttaaaattgaccaggctttggcttccagccaatcaaataaagcctacactgcatggtgacttctctgtataaaattgttcggcatggtgcggtctctgcacaagattgctctgcacatgtgttcttggaaaaattagtgattatgtgttgatggttgtgtctgtaaagatagcaatttgtgactgtccaattgaattttaataacatagtcaaatcacttcgatcttagctatctctcactagaggtagaaatggaggctttttgtcaattaagtaattttttgactctctatttccattctttaaaatcataattcaaagtaaaagttatataatattttgctttgataaagtccacagaatgaggatgggccttatcaaaccctcaggatttcattaatatgaataaaaacttcaaaggctcttcttttgagaaaaatgcttaaaatatttcatgcttgaccttggttttataacaatgatttaaaatgaattctatgctgtttcttaccttttaaatcagtttttaatctatgtttcatttaagccatataaaactactactctatctttagataataattccaaccatttgtagaaatggaaggcctacttaattttgaataaaagtgcatagagcaaggtgttaactgcataaatggactactttcacgagtagtcttaaattaataattttcaccaagttctcgaaggcctatttaaaacattacctttttctatgtatttaatgctgttataatcttcaggagaactttttttttttctgttcgtaataccccaaataaaatagtccataaatcagattacattttcaaaataactttggatgttacactcctgtataacttatttaggatttaaaagcactgaatcatttcttctaatgttatcgggaaataacatgacttgcatgttgcatttttgtttctgtagaatgctccagtaggatcaggtttatcgtgacaatgtaaatctatatattttacaaatggatttggcgagttggttgaagtcagtttcagcagtggaagcagaattaaagtataacgacatcaatcccttcttctactccacaccttcatagtgctatgaagtgttccctaaaagaccttattataagtgaaattttacattattcatgtgttatgtgatattcatcttctcatccatgcacattcaatcagaagctctgagtactatgattcaacctatctctactccacacaggcatagcactgtgccagacacacaacaggctctctaaatatgtgcgtagcagaggagtacgtgggaaagccaccattcaacttctcaagtgaacgccattcaatcccactcactggtgagtctttctagttttccttcaacacctatccatggcaacctacattcgctcggcctattttttgtcactttcattctccataatattttaggtccagaaatacttctttttataaatatctttggaaatatattttgtttacagatgtgtagtaaagaatttggctccaacctcagaaatgcctggactttgtgcttggtttctgggaggagaatctttgccatacttatatcttcgtttacagcaggagctggccacagttggatttcagggcgaggctaactacatctaacaatcttagtgcgaagttgggtcatgccagaaagaccaaccatgttatttatggtgggagctttggtttacatgacgtcagttgacctgaagagtgagttcaaccatatgggcaattaatcaatgagtcgtgcctacatagtgaagcctcagtaataactctggacacagaaacccgggcagtcttccctggctgacaatcctgaatactgctgcatacttatgctcagaggtcaatgcatcctgattccgcagggaacaggcaggagaagctgcacatttggaagcctcctgggtacagcctcaggcatctcttcttcagatgatgtttaacatatattcttcttctgtaataagctataaccatgagtgtaatagcttttcatgaattccatgagtcccagtgaattttcaagcctgagggtggttttgggaaacccaaacttggagtttgtttgagaagtaagaatgtgcttgtggagggtcatgcccttgcgctttgcagtatggttagttgtggataataggtcacactttaaaaagtttgccttcatattgatcccctttgaagcttagaatctaatacatattaacccctcatttgatagagcaggcagtagaaagtttgagtgattcatatgaaagtaggaacagcaccaggtcgtgttctccaactgcctactctgtttcagtcagaccattgtgaagttactgagaactctgcccttgggaaacgtccataaaaacaaagatcttttagaatttcaacacagccagcaagtatagggcaatttcagttcatttttattttatgatatattaaaaaaatcatcagtcaaaatggactcaatgtttctatgttactaaaacaataaaacttttttttcctatttgaatgtaggagtttgctaatatagtttttaaaatgtacttgaagttcctttatgcaaggtaccttgtacataaattactctggtggcctggatttaccaatgatatcagaaaatacgcatatgtattgctaaccatattacacatcatatatgaacataagagacactattagttacagtccattaattttcaccataatccggttaattattatttttcttattcttaagaccacagaactttgtaagatgaactaaatgcaatacacgctaatagcaaagtccacattttgaacccaggtaagtttgaagggagagagtagagctgttttactctgcaacacttaactctaaccatagttttctggtgaacaaacgtgttctctaagaaaaatatacaatcatgaaaagatccaaagttcactttaagttcaggttagcactagaaatctagtctctatactatagaattatttttaaaatatattttctagttgatatacttcatgcaaaatgaaatgacaaatgaaagacaaagcatggaaagtatgacagatatgtaagttttccttgtatgaactgctgctcttaatttgctcctctcccctcctttttcagtatcagctgtaatgccaacttctagtgagctcgaaaacaggacgtggctttctatcatatgccaaaaacacacctttaacacactgtccttggttccttcatgactcctcacctgtttcttggcaacgaggttcagttgtctaatgtgattgcagtcgcctgtgggtttctaacggagaccaacgtactatgtacctgcacttgagaagatcattaaaccttcctttgtcctacatgaatattttatcttggctggcataactgccgggctccacaactctgataaaagtaaaatatgagctgtcttagcagacagcattgttcatggtgaaaataaccctgattggtaaattgcatctgactgggggtactatgaatgaacaacctatagcatttgagaggccatagatttggactcgtgagggctgtgcctttgaacctgcacctgatgcctcttgggagaattctgggatttaactccacgtgagcattacttgggaatggctcctatggtatgtgggtttctgagctgaagtgacctcacattcatctaggtgaagcttgttgtcttggagatgtatatggctctcctgttattggaggtccagagaatagggttttttgtttggtttggtttttattcgttttgtgttttgtctgctataaagattttaccaaaagaaatatcctaacttttctactggcccactgagtatcctgtctgcttatctttctaagtgtgccgattacagatgtgacctatgaagccactggcttttaaatgtctaatggagcctaagaaaacccacagtggaagtcatagcatccaacatgcctgcattccaggatttccttgctcctggaaagtcaatctttgtaccctggtttaatatctgttttctgtgatgaatgtgtttatatcttgtggaacatctaaaaccaacacaatcattccatgccccaaccattgcttgctaaatcaaagttttctctcccatgtgcctttctttttgccatcagtgaaaatacactatcatttttttcaactttttaatctgccctgctgtgaatttaattcagttctctattgccttctacctatacaacatcatagcaggtttttctaactcttttacaaattatgacacataactgccttaacctacctcatacacagcttccacttaggggactgtgataacttaccattacctcttagaacgaatttacattctcctttctgtcatctgcccaagggcgtccaccaggtgacctcactttgcttcctcagatttatcctctgatgtggccctttcattttctcttcctgaatttttctctcacttgtctttcattacattctcctggaataagtgttccttctcgtaattcaaatgtgagcctttcgccagaactcaaagttcgcctttcccagaccttacaactgtttgctaccataaaattcaccttttctttgagattttcagcacctgtaattatggtatattttacttaagctagaatttgcttatacatggccatactatatttctctatttgctgaataaaccaaatctctaaatatttctttggttatttgcattcaacgtgcttttctatataggaattcaaatgatctccaaaacaactgagtaagggaggctaggagaaatgattatgtttgttttgccactgacgagattacacacagagaagttaactgcctatcacaacagcattgcctgccctcaaatggcaagttagggcaggtgtcaaaatctcttggtcattagttttatgctattattactgtgtcttagttcattccaggacctatagcaaattacatttgtctggggatttttaaacagcagaaatttatagttcacaattctggagtctggagattccaatatcaaggtaccaacagatttggtatctggtaagatttgctttgtctctgcctcaaagacggcacctccctgcagcatcgtcaaagtggaaggagaggcaagagagatccctcaagcttttttaaaggtgcgaaggtcgggcgcggtggctaatgcctgtaatcccagcattttgggaggccaagtcaagggattacttgaggtcaggagtttgagaccagcctggccaacatagtgaaaccccatctctactgaaaatacaaaaactggctaggtctggtggcaggcacctgtaatctcagctactcaggaggctgaggcaggagaatcgcttgaacccaggagatggtggttgcaggagttgagatcgtgccactgcactctagcctaggctacagcaatgatactctgctcaaaaaaaaaaaaaaaaaaagtgctaataccattcatgtgggtagaatcttcgtgacttagtctcttcccaatgaccccatctccctgcctctaaatacgaaccacatcagatattgggctccaacattcaaattttaggaggacaccaacattcagaccacagcgcactgtttacaaaaatataatctaagcctgacatcaaaccttgcagtaggatgtatgttttgttcacttcagctactgtaagttacaaatattctaacacacacacacacatttctcatatatgctcagtgaacaaaagaataacatacatggtctctaattcagattttgttttcatttcaaatgttaaactacccagaagagaattttctactagtttttctgcttaaaaattctacaatcttctattattcatgacgaaaaaaaaaatcagaaaaaacagagtttaatttcttccacttctttcagtttcaaagattcgtatgatgactataaaactgacacgtatcctttagaagcttatggaaaaatgacctccagaggtttagaggtctgattctttttcctgaggctgcagtctaggtttgtagaaaattcataaggcagaaacaaacagtaaacaggtttgcaaatcttagtgaagatgaatgtgaagatggcccagataatatttaagtaaacatacaatattttcacctgatttttaaagctgttgatattttaaaaaaaaatgtgaccagcatttatggatcacctttaatattataggaaatctgctaaatgataaaaacagaataataattcagaaatactccttgctcatacaaacccatagactgttgttaaaattaaactcctgtgggaatcataactcaataatttggccaatatttgttgagctcttttcctatgagaggacagttatggttatgaaagacgatgcatagataaccacagaaggggcaggtatatacatttttaatcaaaaggtgcaaagatgaaggtgagaaaaagcatgagaagaaaggaatacagtatgagaaggggttaaggaaaagagggaggaagacactttttttattatactttaagttttagggtacatgtgcacaacgtgcaggtttgttacatatgtatacatgtgccatgttggtgtactgcacccattaactcgtcatttagcactaggtatatctcctagtgttatccctccccagtaaccccatcccacaacaggccccggtgtgtgatgttcccctgaagaagacactttcgactgatgaaggtgccctactgggaggttggaacattatggtaattccacactcccctcctctcctagtaaattaaactataggcaccatcgtggttaactagatgttattatagctcttcagggtctaaagagctatttgttatacagaaacatttcctagacattttcctagttttggccagactagaattaaataattaatttctttgtatacttagtaaaacaagaagtattgctctacgtggtctcggacttctgttctgggtgaacgagcagcttttccttccagttttggcagcatgacatcatctgctttagtctggttgaggtgctagctaatctcctaatttgtcaagtaagacatgctttgattctatttctcggcatatgccaacagtgttactttggtaacaatactccacacactattctggcctcactttctcatcatttgttctgtgtgtgttccagctcaggctccgattccttgggtgtagaggcacctctgatatttaacatcttggaaaatgacagacataagtcatcatctctgtcctcaactaccaaccaagtagggacagtaagttacttctgcctcacatctcagagagcggtacttcaatgtgacatacgcactcaatttttaatctgtaaactctgaaatgctcttgctggtatgaaactgggtttgcaactgaacacattccctcagtccctgggctccttgcacagctctgcctgcaagcgagactgtgagggctcagaggcagagtcacaggtgctcttcagagatgggaggtgctctgggaaatcagaaaagggtgacaatagtgggggaaagagttgggggtggaggcaatgagggaccaagcaggcacgtacagtgggaagccgcaggagaattcaggtgcctctcatcagcaaagcgccaatgtgttattccttcatgtatttattcacatcatcgatgaaattccatcagtcctgttaagtaccaggcactgttctaggttccaacggagcagtaaatacaacaacaaaatctccattcacagcttacatgctaatggagtaatgctatttgctaggtttccgtcatatttctctaaaataagtgcctctttttttggtatactgtaaatacccttctcacattgctccatttgagctggaaacacgtgttatagtatactagaattataaatagcaatatttacaagtaattgtcaaaaccacattaattaactcctcatgtttccctcgtgtctgggaatgtaattaaaataatgaaaagtgaaaggaatttcaccatcatctgtagtcatgttagtgagataaatcgccaccagaaaacacagtaacacttaaaaagaacaagtaaaatgtctttaaaaattctattcatgagctttcttccaaataaggattacattattccatatgtaagtgtttatgaatactctgaagatataacattaaggttttaattcacaactacatacacatctaagcctaaatgagtaaagcattattcctaattctagttttgttgccacagattttgaataccatttgtaattacctataaacaacatttttaaataaatacttcttaaaaggaagctgctgtaaaaggctggctgaaccctggggattggcatttctgtccttttactggaatacagaacattcatgtatttcatttaccattgcttagctcatatggtttagtaaatggaagcgtttccaatttgattacctgatatgtttaaatagtgtgtgcttgtgatattaatattttacacatttcctgttgggtgcctgacgtggtaaagcatcatgatctaatgtgtacgttttggtctttaaatgacctttttagttctggtgatgacactagccactgaaaacaccttatagtctcttctttccatccctcaaacccaaagtcactatttggaatgtgattcaggaaataataagcttataagatttctatagatacagctgttctcaaagctattccataaggtagtccttggccactacaaagccacagggattctcctgatggtacaaacatatgcaaagtgaggactctttccttcaataacggctcacaaatccttaatatgaaggacttcaaatcggtattaatcaactaaatttaccatgttactaggactccagttctgctgcaaatcctcctgcaagacatggtgatgttttcatactgccactggacatatgcatgtatggatttgtaagtaccaccattttcatgaaaaaccattttgcttataccataaaagtggtgagtcagccaatatttttaattctgtgcattaaattaatgcacttgtagaattgctatttagtttttacttttccaaccagttttttaaaaatattgtaaccattttgattgattgattttttttctactatactgtttttccactgagtggtggaaaaaggcagaatagttcactggtctttggtcttgtcaattgtatatatagacaaaagagtgaattaatgcatgaataaattagtaactagctagctagtgtaagaagcaagaccataccattacatatcttgaatataaggaaaaccatgaccagtctaatgattaccacaaacagtagggtagcctaggaggacagactggatgtctcttctattgaactttataataccccaaatttccattcttttcttttaaggatacttactcaggagtatttgcccttgagtcttcctggctatggtttaaataactaaacaaaatatatctgacctgctgaagagggtgtcagaataaaacagatatgttttaatgtgtcccagacaacagaaggctagtgagagacgtctaatcctctaatgaactgtgtggatatctgaaacctaaacaaaaattttaatctatacatatatctatatatttatatatctatatctatgtatagtatcttggttaatcttcacagaaacctagaaccatgtactacacttaactcatgcagttgttaataataatagctgcttatgcaaacactggcacaggaaccctcctcccagggccaggcagcttcctgtatatgtggagtatgactcacattccaactgaccttccctcaattctaggcctccatttccaggattgaagaagcatggaccactggccagatcttcctgaaccgttcccaagactctgtgtcacctccgcctcctgcctggacacccttacagccaatctttgtatgtcttctctggtgtttatgtcactgtgggagacccaagattctcaggtcacacacctcatccttccttctccaatcctgatttggccctgcaccctgatctgtccctatcacccattgccatatctctcatgatgcttaattccttgcatgcacagtatttaaattatcctagcactttctgcttggcagaaatcacagccctaattccactccactctgctgaaccaacacctggtgcagttggatgtactgcgcctgtagaaaaaacccagaacgaggatgggggggcatctccatttaactttatgaccattgctctgaagtgtgccttttcagtcgccctgcttgcaggagagatttcattttcacccggagacatttattttttgccttcctttctccctaaagtctccagtagtgccatctgcaggccacaggtccctgctgtgcagatggtccacacaagggcagctggggggcagctgtaagccgatcccatgccacctgcatcagccaaaaggaaggggctctctcattcaacagacacaaagaacacttaccaacaccaccaattcccaaatgcgtacctgcagcctgaaccctgttctgaaatgtggatttgagggtccagcagcccactcagctcacgcaataggacccgaacctcacatgcatataaacaagttcctaatatttctcctcaaactcatacctctgcaatctttccatctcatgaatgcagcgttatccttcctaaaagccttgggggcactcctgaccctctgctctctcaacccacatccaacacatcagcaatttctgttcgctataccttcaaaatataagtagaatctgatcagtcgtgtttcatggccaatgtgctcatccaagccaccattttctcaggctggactgttaccatcgtcttctaattggtgtgcttgcttccatctttccaacatcctccctggctaacaccccagagccaaagagactccattacaacctaagtcacataactcttctgctcagatgatgccgatggctttccagctctctcgaagtaacagctgcaagcatatttacagtgccctcagggtcccttcgtggctgccacgctgacatgaccttagggacctggtgtctagtgtcactctccttgttcacaagccaagagctccagctccacctgtctccacaccgtgccctgaaatacacagatgtgctgcaccctgaggcttctgcactaggccctccacctcggtgtttctctgatgctctgcctagcactgcatgccttcactcaagggtctctttctcaaattgtgacacaccacattctccttctctgcttcatttctctccatggcatgtatcacctgtggctatactatatcctgtataataaaattatataatacatagagactgataggtctatgaaattgacttattttgtttactccttttctccaatcctgtcctgccttcataaagcgtgtctcaccttagttttaacttgcattcccctaaatggctagtgaggctgaatgcgtttgatatgcttaacaatattttatcatttcttcctgagagtgcctgacttggttcacaggtagatataaacctatctatcagatataaatagtgagagaaaacatgcactttctcaccgctgagctaacctggggaaagttctgcctttctagttgccacaggaggaaaggtgcacaggtgcgcgcagccaggagcatgtggggaagctcatcctggcaggacccaccccagcagaagcactagcaggcaacacggggccaggggtttgatgtcagggaaggcaagatgggagcttgccagatttccgtatcaactgccacttaataatcacattccatgcttttatgaattatccttactgatctaattttgtatcagtagtgcttgaagggcttaaaggaaaaactagccctttccttaagcaaaagagagtgagctagctatatgtcatctatatattttaaaattacaataataatacataactagaggaaaagtgtaaagaaatacattaaacaaaaagtaggcgtctcttcattgcttaactgtaagcataccctctgggtataatgattattaagttatctactaataacatgcactctataaacaggtagaataaaaacagagattacacattattttacaatttgaatcttggttaaagaggttcttccagaaagtcaagaagaaaatgtcaaccatatttctctttctagcaaaattaatagtacactgaaattaagattattcaactgtgtaaacgtgttacataccaatatttccacattatatatcctcagattttatttttatttttactatgatgatttgtagcacatatgtaaaaagaccagtgccttatggatacctcttttttcccccagctatgcacatagcactccatgaaacatttatatgcatatatctttacatgttggtgggtatttctctcaaagaaattattagagttgaaattgagggattaatgtctaagaaaaatttaccgtttgagagctatggtcaaattaccctccagaaatgtccagccatttctctccaactatttgtaacagaggatctctttccccaaactcttccaatatgtttatgaatcttacaggtgaaatgggatctacttatttttgcttttatttacctgaatattagagggatgttaagtattatctgatttatattcatttatatattctcctctgttaatgtcctatggccatttttaaccataaataaatgtatattaattagagctactcaggaattgcattcttattgtaaaacatacacaggagagaaagaagcatctccaacattaacaccattctgtcttaggttccttagatgcctgagtttaatgttccgtttgctagcttttcttcttttattgcatgtacatagctttttatgtattcataaatgtaaatttttgttttatattcttaaatataagttaattttttctcattcaatgtgttataatttttttaaaaaaattcaatacatataaatctccatctttgtgtattattccatgacttacgtatgttaagccttatttaacaattgtcctattaatagacatctagaatattttcaattttttaaaacaagtaatacctcactcatcatacttttatttgccttctaatgcaaatgtgcaaatatttttctacaatgtgtaccaaggaactatattaaaattagagaatacatattttagcacttaataatgccaaattactcttcaataaaaagctgcactgatttatactcctactagtagtgttggaaaatcacaacatcatagttgatattgacaactattatgtctcttactaaaataatggattaaaaaaacttgcattggtttcttcaacttgcattattttcctttaacatgcatcatttaatttcaacttgcattattctaaattactagtgaggttgaatttattttcatagacttaataaacatttgtatctccataatgaataatgcttgattttaatttttcttagtctattaggttattattattgattcataatttttatatattaggaatattagtcttcaaattcagattatacaggatatattttttctcactttaccattagtctcaacctttaatcttttcatacagaggtcaatcattttcacccaggtaaatgtgtctcaaaaaattgcttttgaaatccacccttctaacatttgagaatgtgggtaaaatggtggatgacataaagattaaatgtaagagttgttgatgtgaatgaagtgtgaagcttgtgaaggctattacacaattagcttgtgagccaagaactcccttctgaaagaaaataacaggtgttgattttgaaataaagataaaatgaattaacgtagccctaatcttctgaaaaacacagcctaagttttgccattttctatttgtgagctacaaacctgcactatttcctatgcaatggtgtgcagtgagtatagtggttaacacattattttggatacattatattgctcttttaggatacaacctgctgaaaggccaattcccttttggttttctcaaatttctttccattcttatttgttctttttctcatttcatgttgttttaacccgtgtttggatcctcagttaaattacagtgtttaatggaaatgtgagatcgtatacttcattctggttgttgtcgttgttgttgtttttagggaaaagggttcttctgtgaactgaacgtgtcaggtttggggtcaccctgtaagtgccatctggctcattctcagttctcccagctttcccccggcaaagtgccaggtgctgtgttggcaagatgtccctgcttcagtgactctcaactgttcattactaccttcctgaagtgtccagttaaaacgcattatccgaagcccactgtgcaaatgaaaaagctgtgggacaaggcaggtaaaatgtgctccctggtgcctgaactaggtaatgttctgccaggtcactgaaaggctgatctcaagaactgaggttgtctgtttcagaattgcttgatagagttcagtaaaaaggcattcatttcatgtcagtttccacaatccattcattttctcttaatttattaatgagtttatttcctgagcccttcattcatgaagagcctcgtgctacttagaaggccttgttctcactattaacagagtgaacagataaccttcaaaaccggagaaattttttgcaaactacccatccgacaaagatctaatatccagcatttgtaagcaacttaaacaaatttacaataagacagctccaaaaaaaaaaaagaaagaaaaaagaaaacagctgcattaaaaagtggacaaacaacatgaacagacacttctgaaaataagacatacatgtggccaacaatcatatgaaaaaaagctcaacatcactgatcattagagaaacgcaaatcaaaaccacagtgagataccatctcacactactcagaattgttgttattaaaaaatcaaacaacaacagatgctggcaaggttgcagataaaatggaacatgtatacactcttggtgggagtgtaaattagttcaactattgaggaaactagtatgatgattcctcaaagacctaaaaacagaactaccattcaagccagcaatccctttactggctatgtagccaaaggaacagcaatcattctatcataaagacacatgcaggtgtatgttcactgcagctctattcacaatagcaaagacatggaatcaacctaaatgcccatcagctgtagaatggataaagaaaatgtgatatgtatataccatataatactatcaagacataaaaaaaaatgagatcatgtccttggcaggcacatggatggaactggaggccattatctttagcaaactaacacagcaacagaaaaccaaataccacacgttctaccttctaagtggaaggtgaataataagaacacagggacacataaagggaaaaacagacactgagacctactgcagggtggacggtgggaggagggagagcatcagcaaaaataactaatgggtactcggcataatacctgagtggtgaaataatttgcatatcaaacccccatgacactagtttatctatatgacatgtatccctgaacttaaaataaaagttaaaaataaataaataaataaaaagcctttttctcagtattaaggatacagagaaaaatcagatggcctgaaccaacgtagcccttgattagactgggagaaagaaaagcacacatggtcacggtgtttgtagtttctggatgttaggaacacagaggagatattcatttaagccagactggctgaactgggggaggtcactgatcttggagacaactagatctgactttggattctgaaaagagaacagtgcagtcttgagggctgtgttggtgacataggtctgtttatacacactgtgcggctgtagaacttctctgtcaaattagcatctgtaaagctttccacttccctcccctcaaatttaggaagttctctgtgctatcctcaggctgggttctttcactgccctctctccaggaggcctaccccttcccctggggatgcaatctgctatgtgctataaagtgtaattatctagtgttccacagccatggagaagaccttcctaaccttcctgcaattttctaaaggatgaagagcatgtttattttactgttagaatgctcaaggtccctgtgtccctggaccacctgtactttggaaatacaggctgcgtaactcttatctaaagtgaggttttgaaaaattgtctgtatttagaactctttaaagacgtacttttcagtgactcctacagtcattataggttttatccctggatcaaactaagtaatcagaaaccagaaagctcagacttcagtgcttgaacttttacagacttcttttatgacgttgcattgaaacacatgctgtcggcgttcattgaagacatacaagcagcatcttagggagatgttgctgcctctgtgatggagatcttcttaaaagcatcattcagtagattaagtctcacatgtggaatatgttttttggtttccaaaagaagctgccatgtttttctctgtggatgatgaaaactctgcaagtccctcctacaacaaatgcgactggcgcccactgctcttggcaatggaggtgagaacataccatgtctgtgacggggaaggacagggtttggaaggagatgcagacattaaataggacacacaccaaagacggggtcaatttcggaggatgaataaacccattaagaaaacggcaaagggtggtgagatccactgcgatgctgcgcaccagtgatttgaataagacttggggaagaccttggggcctgacatttaatctgagagcttctaccatgaaggagccaagcaggatggacgtctggctgcatcatctcaagaagaatggatgcaagcacaaaggctggcatgagctggggcggctgaaagagcagaagagcggacacagaaaggtgcctggggaccagatcctagaggggcttcaggaacacattgtggggtttggaaattactcgatgtaaaatgcgacactggggaatggactgtagcgcagtggggaaggagtggaacagtgaggccattcgggagccaccacaatggtcctcatgatttgaattgagaccatagctgagaagaaggataaaaggcaatatttacactgcattaaggatcctaaactcaaagaatttgctgttctattaggtgaaggagaattagatactaagaaggacagtgagtgacgttttggcgacttctgcgtagacatggtctatgaagttatggattggaggagttcctgcaggagggagtgagatgatgtaggtgaatgggtggaaaagcccgaactgggttccgagggtcactggcatggagaggtggagaaaaggggaggaagcagccggcatggaagaaggaaagcaggagaggctccttcaggaggaatgttttattggagaggagtcccattgtgagaggaggaagaggaggaggaccagagtttcctcacagcctccggagcatggaagtgggtggtgaattccaggagagcagctctggctgaggtctagggagggggcagaatcttctcgagtggattgaggaaagaaaggcagtcaaagaaatggagacagccagtgaagacctcctcaaagctttgtggtaaagggaaggtacaaaaacagctgagagcttgagggaatttgcagatcaatcaaggattgccttttggaaacactagagtgtgttccaaacttggtaggaaatcacaagcaaatttccatgtttctctttatgaggagatcaatgggaagctcggaggcaaatttatggagtaactgtaaaattgcgaagggccacatgtcttacatttcttcctacagttctatttccagtttttataccctttgatcttaatactgcattttaattacctattttgaaatatacttgttgtcttttctatatatttgttttcttccttttaaaaaataagttaaaaaagcaagaaattaacctctggaaaccagtgacagtcatgttttgtgaaggaaactcatgtttgaaaggaggggaggggaaaactcctctcacccctgatatcgctaagccagacgtttaaaatcaaatgcattcacgtgttgttttatttaccttagaagtttttagaattagtatgggaaaaggtgatgcacatttcaaagcccaggatgactgttgtgttagttttcatgtatagtgttgtcctagagtactcaataaactttcctgtatttctaaagaattctgcacttagaagcctggagacaccattctccttttattcctgtctcttgttggagagtcctaacagaattgataaaatatgtaagtgtgtaagtgtggatgtaatttattaggagaaatttattcatatttattcctaaaaaattattaattctaaaatgaggtactggctttttatcatgcttcatggtattgtttttgtttgtttctttgtttttgagacagagtcttgctctgttgcctggggtgaagtgcagtggtgctatcagtgcgcactgtagccttgacttcccaggctcaagcaatcctccagccttggcctcctgagtacctggaagcacaggcataggccaccaggcacagcaagtttttaaaaattttttgtagaaacgaggtttcaccatgttgcccaaggtggtcttgaacttctgacctcaagtgattcgcccgccttggcctcccaaaatcatgcgtgggattacaggcatgatccactctgtccagcctctcatgcttggctttttatcatgatttatttagaagcacaagaaataattcataagtcataacacagatctcaagcaataacatactttcatatgaaatgtgagcattttcatttcgtatagtgtttttttgcctgtcgtaaccacaatgtcttaaggttcttacaagggagattcagcctgaagtagtgcaactcctcggtgaagcaggcgaattttgcactttccccatcccttcctctacctttcctacaggagaagtgacttttggaagaaggaagtggacactgggctcagcaccccacactgcttgctttgagacctgcctacagtgagcagatgtcctggtgtggcccttgatgcgtggtgaaaggaaacttctgcatgctgggagccctccaggtgtccagctgtgtccatgatgggggaggcatgtgctcttccatggctacctgccagacatggctgcagaccgaacccacgttccatacaggctcagaagcggagtctagcgttccagatgaattctcttaatctagcaggccctacagctctctcaatttgcttctaagacgagggaggaaatttacttatggataccctcaagcttcgatgttccccatattcaggtaaaggccagagaaaaaaatgagctcttcagggttacactgttagatctaacaaccagaatccacaatttctgcccagttcatctactccttacagtagaatgtctattttcccctgaataagggtctgagcacatggcttgtacattttatatattttcatatgcagtcacaataaaatagcaagtttgaccgttaataattcactttgatatgtaaatctagcgttagcatggcatgttaagttaaatggaacattatcatggagattgtatatttatagaactgacttaaattttgtctaataatgacaaacaaacattactaaaccattcagaaggaaaattgtatcttcaagtaaatcattttataggtcgtggccatgacctaaagctttgtctacatcaaggtcatgcaaagtttttttttttttaaacttaaactgaatgtaaatgataaaactttccaaagataaaatgatttattagtacctccatctaattacatattcatgctgggtggtcatgcattgaacatttgctatcagcttctgcctgtcttccttcctccttccctgcccacattcctttccttttgtctttgtacattttttgcacgagagattcaaatggagaattccaaattttgtagttcagggataaaactaatatcaagtagtgagaagtcgagatgataatttcttagattatatacaatttccaggaatgggactaaaataaatcaatctcttctcccagtgtataatattctctacactattctttaaaatattcttacacgtgtatcttctttatttgatacacgaagaaaatcctggatttgcctctaagagtctcccacattataacaataatatcaacaatgataccagtcttgcctttccagtgtaaacatgaacagactcttaaatattaactaagtagaacacaagctagctttttaatatttttatttatttaaaaaatgaaaaaggaaattatatagataggaagtatagaaaaaattgcgtgcattatttcaaacatttttaccgataaatctgtaagatctatctctgtttattgacagaaaaatctccaaaagacccaaataagtagtttcatattcaactagtctgagttgctagtatgtctgatgcttcagtgagacactgtgtcatgggaaatattagacccttgtactttatgttggacagttatgcttcctgagtttgtgcaaactttgagtaactataacgacgaccacaaatccagctttccatatcttatcaagtgtgtcctggacacaaaccataataaactgactgagcttaattattcaccaatatcacaagttatatgaagtctcagagaatgtacatgacagaaaataactttaatatatgactaagtttttaaaatcatgatgcaagcacttcaagcaaaaaataatatattagtactaataatttagtatattttacctctgaagtttggatagttctctaagaacagggatagcatctgagttattctggggtacccaagcatgtagtcatcttcttgaatcttaggtgttcaaacaatcattttgttttattagtactatcaaagcctggagcaggtggtggtttattacagcacacttctctttgcctagaaatatacaggtatgtatttatacactatacctgtgtatataggattgtatattacatactgttcatcaatatgtatcaatatcaaatgtatgtcaaaaatgtcctgcagccaaatctaaatcattacaagattattattcattagaatcatctaaggaatctctatagacataaagtattcatacactgtagcacaagccaattaatctggaggaaatgaatcagtccggtcattgagaacaatgtcccaggtttttgcttctcgttttgcttagaaatgggacagagaccaagttaccgtgagagcaaggaagatgtagctcctcccccgctacagtctactttgtcattctctattgatattaccttaacaatcacatagctatcagaatgagatttgcttttattaactggtttcagaaatgaaaaagcacaaacatctttttctgtgtagacaccaatatttcttgacgtcacatagttctcagaaaaaaatgaaaggctaactcctaacctacatagaaaaagtgttgcatgtggactagcacgtttttctatgaactaacattgctttcagcttcagatatttgtcatttatttcgtgtatagagtgtgtaccggtgtgcgtgtgcgtgtgtgtgtgtgtgtgttgcgttttagtcttcttctggtgtggatgttgtattcacgtttttatcccctataacgaaatagtgcttggtatgtgatacgacttactacatatttatttgatgggttagaattgtattaagatggactggtaattttgattctgtaccgaagttactgactaatgtaagtataaaatcctcgaagattataaaagattttcttttttttttgactgagaactcctaacctaacaaacgtattactaaattcatttactgtcacaagtttctactgtgactgctagtaccttcgaccatggtacagaggaaattggattcaagaatagccaagaggagcagttagggaaaataatgcaatttcaggtgcaattctatatgaatcaccttctcttaacattcatgagaactcaaattctcttgctctacatgctgatattagattacatttttcaaaaactatcccattattactgcatcgttgttctttattgttaattgacagtaaacaatatgccaaattgccatataaatgaactgcctcatgaccaaattagcttcagtttccaggatttgagtgatatttatgtaaattttaattcttgagatatctcgctgcttcactttatttccttagagttataaataaaatttgattttctaaagccacgtagtttattttactaagtgcttctcagtagcattgtgaatagccagttatcttccactacacaaatagtactatatttttggattctccattttaaatctaggacatacatgtttcttaacctttcctgtaaagtctaaaaaggaagaaagctttgcacacgtttcccaaatcctcagctccaatccttaaataagcaaaatatattaaaattatattatacagctattatccaaaatttgtctcacgaaaaacaatgtattttcttttagatggttggttataaagataattcctaaaaataacgtaatgacctgcgcatttatattttttctaatacaaatttttctagtcctccttcgtgtaccattgaaagtaaacacaatgttatttaccaagtattacattggatgcaaaattagtatagaaaagacaactgcatttttaagtactagcaaaggcaaatgaagatcaaaattttaaaaagaaatcatttacaatatcaataaagcctcaactatctatgagtgaattcaaaaaattatataaaaaactgaatgcacgaaatctgaaatattattgactgaaattaagaagatctaaaaaatgcagatatgtgccatgtttgtacattagaagacacaatattttaaagatggcaattctctacaaatgtattatatagattcaagtcactctcaacccaaacctcaacagagttttgtttctttgttttttgcttttttttttcactaattcataagccaattctaatatttccattgaagcaaagaagactgaatatatagatatataaaaagcaagttggggccgggtgcggtggcttatgcctataatcccagcactttgggaggccgaggcaggcagatcacaaggttaggagttcaaagaccagcctggtcaagatggtgaaaccctgtctctactaaaaatacaaaaaaattagctgggcgtagtggtgggtgcctgtaatctcagctactcaggaggctgaggttgcattgagccaagatggagccattgcagtccagcctgcctgggtgacagagcaagactccatctcaaaaaaaaaaaaaacaaaaacaaaaacaaacaaacaaacaaaaaccaacaacaacaaaagaaaacaaaaaaaaacaatttggaaaaaaagagaaaagcagagcttggggccttacactaccagttatcaaaatttactccagaaattaattacttaagactctgaatggtcgatgcaaggaaagacagctaagcaaagggaagaacagaagtgagaagcaaatccacactgctcagggcaaggggaaaaggattgacttctccataaatggggctgggtcagttgcatgttcatacagaaaaagttacctggattctttataattccacagagattacagatctgaacttgaaagatgaaacaaatttccaataaccaatcacgagagaatattctacgatgtctgatgatgcaactatttttaaaaggtattaacaataaaagaaaaaacatatcaatagtctaaacatattaaatttaagaaattctggtcaaaccattagccagaaagtgagaaaaaatcatcacaattggctcctccaccaagatttgtgtacagaatatacagacatcttacaaatcaacaagaaagagagagacaacccataaagtggaaaaaaaagtaattgatttgaactgacacttattagaaaaagacaccaaatcatcaatccaataaacacacaaagtcattcaacttcattagcagtcagataaattcaaataaaatctcgacgatgacagaatactgcatccccactagaatggttaaaatacaattttaaaaacaggaaacctgccaaatgttggttatgtggagcaactggaaatttcctacactacggtggtattacaaatcagtagaattattttgcaaaactattagactctctctgcctcggttgagcacatgcatacactgtgagtggacgatcgcatccttaggcatatacccaatattcacccaaggctagaatgttcatagtagcactatttgtaacctttgcaaactgaaaattatgtaattgccctcagggatataaataagttgtggtatgttcacaaaacaaaatactacacagcaatgaaaaggaacacattacaaatgtgcacaacaatgtaggtgaatgtcacaaacataactttgtgtgaaagaatccaaaagcaaaacaatgcaaaatctacagtgtcatttacagaatgtgtcaaaataggcaaattagtcaatgctgtcagaagccaagagaatggctacccctgagttgggactgacgatttcaagagcatgctagcatcttgtgggagtaatgttctgcatcttggccttgtactgaagtttcacaaactctctgcgaaagtttgttgactctcaatagctgatatgtgcacacttctgcatgcatattttatcctgaaccaataaaacgcctgaacatatctaagagccactgacataaatgtgtcttgactatttactctaagaattccctaagaatccttagtgtaaataacaaaataaaaataaccacatcatacttgcaagctcaggccttggaattaaatggctgggtgcaaatgcaagaaatgcaatttactagatacgtgtccttgaatgattcatttgacctgtaattttcctcatattaaatattgagataaagtatttccagctcacatgtttactgtgagaactgaacgacataatataatacacacaatgtcctggacactaaaaaagtcaattaacatgaagttttccagctatcgatttctcatagttttaaactgggtgtatgtgtgtgtatatatgtatgtgtgtgtatgtttgtgtatatatgtatgctcgtgtataagtgtgtatatatgtatatgcacacaaatataccttttcactgctcctttaaatgaatcatgcggctttatgtactatttaataactaaagcagtgaactgatgccttcaaggaatagtttgcaaaaattagtgttattatttatttgatatcaattaatatcaattattaaaattgatatcaattactgatattattaatttacactaacttctatcaatcatgtaccatgtattatggcatggttatgatttatggcttgaaagtgattcattgaaacaactgaaaccagtcatcttaaatccacagggaaaaagcagcttttaaatctacttaaacaatcccattaacaactactgatcagaggaatgaatgcatttaacaattttgacagaaaagaggaaaacaatacggtttttcatatgtgtatttaaatataaattaaatatatgttaaaatatatgaatataggcatacgcttttaaacatacatagatatagagtgtgcacatactaagataaacagacacatttgaaggtcagaatttgctaaatattttagttttcatgcaaaagataacattaacttctctatcagtgtttcaaaatcattattttccaataaaggtaaacagcgaattgaaaagtaattaacaatgtcagtttcgaatttttattcctaagaaaatatttagggaaaaatgaactcaggtggctttaaattcactttttaaataggtaagtttgtttaataagccttccattatcctttgatacgcctctaatggcaagtctaacctgtcttcaacttaacatacaatggccacttgtgtttgttatataaaacattatatgtgcaatatacaaacttgcataaagtaatcaactgattccctagagaactgttagtgacatggtgcttgccaaaagtggcatcttctagcacaaatcttgttacaagggacacagaaagacaccagagaacaaaaatctcaactgccagcctgagcagggccccgcagtagcataacttcacacctggattctcctccttcggggtcccaacactgcagtcactcaggactctgatatacctgggtgtggaattgcacacatacacatggaaacatcggtgagaagtcatttgttctgatttggttaaacaaaaagacgttacttaatgttgaccaataaattctggatattcttctcttttaaattataattttagtactaactcaactgagaaaatgtccatgattggccttaacttgtataaaacctgtgagtaaataatgattctaatcccaatagtattcacctctattgtgtaccttttggtacgctacgcaaggagaatctctacttcgtcgtcagtctgtgtatgaaaatgccaaggctgagaattttgctaccataaaaattataacttttatattaaaggccttctaaatatatatatatatatattcatatatatatatacacacacacacacattcagaaggcatcattcatatatatatatatgcacctatcaaatgagtaagctctgaaataaatgtacctagtttctaatggacctagtgtctatgattctaccatgcttataaagcaagtagcttctcatatacatgcttatcagatacatttgtcgaaactgtgtacctcattaacaagatcccatctcgtgactgtatcagcgttgagtttattaagagacattcacagatcagaaaagtggaagatcccttatgggagactatttattagtgttcacagaaaatcctgaaaagcctctagcatcagacaggtgtgagttatagaatcaatctgaccttttcaggggtttgtcagtatttattggcacacttagtgacatttatattgttaaacggttaaacgaaaatataaaagcttgaagctgccaatggagtagttatgaggacaatatcccatcacaggatgctatcaattatttgaaaaaagctgaagtacaaatttctgcttttctcagagatgaaaataaactctcgaaaaatgtctctagatggtctgttgtctcagaatactagggaaaaaagaactgttgctccacctagtaatgaaattaggcagtcatcatccaacatcagaatcggctatgatgagcgtctgctcctttcatttcttgctttctgttctctattccccctcattattctctccatctttctcaagctcacagaaatgcacgtgtgagctcatgaaatttcaggcactcaggaatatcagccccttctccatctcacaaacaaactggagtcaagtttatttatgacagaaagctgactttcttaaacaatcagttctagaataaaaatgtgtctgacctggcaaacgtctctgtgaacaaaacaatttgctcttttgctaaatttttctaaataggagtaaagtttgttgttaatctgtgaataaatataaattgttaaaagttgataagttatgggcataaatcacaacaaagcaatattgattcaaattatatatatatgtgtacatatatatgtgtacatatatatacatacatatatatatatacagacacatttattattatttttttgagacagactcttgctctgtcgcctatgctggagcacagtgctgcgatctcagctcactgcaacctctgtctctctgtttcaagcaatctcctacctcagcctcttgagtaggtgggattacaggtgtccaccaccatgcccagctaatttctgtattttagtagagatggggtttcaccatgttggcctggctggtctcaaactcctgacctcaagtaatccgactgcctcagcctctcaaagtgctgggattacaggcgtgggccactgtgccaggcccattatatattttttaaacaaactgtggtggcaaattggttgtgtgctagttgtggtagcagtgatttagaatgtaatcgatttaacatattctttacaaggccagataataaatattttggttttgtcagccatacggtctctgtcacactacccagcagtgctgctgaagtttgaaagcaggccatggacagcactttaatgacgaagcgtggctgtgttgcaggaaaagtttattttccaaagtccctggagtcagatttggcccataggctgcagtttgctgagtagtgagatgtatcttctaacaacagctactgatgattcaaaacctactacatgttagacacttatggaagtcttaatctagtgcctctaagatggctgtcatcagccctattctctgcaggacacagacttagggacagatatactgccaaagattacagaaggaaggagggtagaatagagatttgaacacagatctaattcaaaactttctgccctcaatggctacactatactggctctcgcatggtaatgattcactgagcataaacacagccaatcatcaggggactcaggtcatttttcagtgaaatgcatgtcttcagataaatgcattatgaacacttagagaagcattgatcacctggtaccacatggacttcagtgacctttcaaactctgcctcacacattttcccacctacacatcaagacacaatcccactctagctgagctctgaaaagtagagggtgggacttctaccaaaactctattgtgtgggtgaggatgatggcatgcgtagagggtattccagctgctgaagtgttcaagcgcccagaggcaatcagcgtcaacaaggaacatcttagccatgagaaggacatcaatgttcttgcacagcagtggtgacacaaccacctgggaggcccacggtacatcctccccccatcgccaggtgatagtttctgagacgttttcaggatagcaataaaagcaagataaatcaacagctctttccagatgtatccaagaacaagttaccttctactctgtctgaaatgtatggacaaattatagaccctatccatgaaagtggggctaattttgttctaggcgtccagttctcacctctggctgaacattagagttgcctgtttttgtaaacatgaatgtccagaccttaatctcaaccaattaaattagaattcctgtagagcaaggccaaggaaattatgttttaaagctccccaggtaattctaatataaatagagagttgagaacactgttccacacctagagttaagagacaatacctatgtatctgagttacacagaggtcacaggtttggaaggaaatagctttgatctgtggatagaaaaaactcagattactgtaatatctccctaaatgaactgagtgtgtggtatcagaaaaggcattttgcctctgtctgcctccgtttgttcatctgtgcaaggaagaaactaaatattcgaagtcttattcatgcttttatgtagagtgaacaaaataatgaaaactcagttgacatcaattacaatcaggaaaagaatactttcaatagcaatacttaagaaaacagagaaaacaagcttgtcaggattcttatctggttattaaaggagtccaacttctggcagagaaattaattaaacgtacaaaagatattggaaaatactgtacagttatcacttttctgcaatatcattaattaaaaaccaacgctcctttgcctaagtgggataacatggataactaacatcatttgtatgcaatgttcgtcatcccataaaaattataacatacctgacctaaaaacttcaaatcaaaacctagacataaagttagaggaataagcaaaatgtgatgatctgctaaatacacccaaatgccaaacccttgttaacataagcttgacactttgatcttcaaggcaagcatttgtatccaaagtcaaaggatggtgattactcagtcagatgagctctaaacaagcttcatagagaagcctatttcattctatacggaaacctttttttaccttaatgcaaggttcatgtgcaaatgcataattaaaaagaagcgccatttaggagatgattatcattagctcaaatgaaacacaaagcgctttgctggctcccccatctgaccttgtcatgcctcttgtatcaagtaccagctggagaaagctgagctaataatggcccagctgcataatctaacaagatctttgtcatacaagcaaggtcaagtgctctatcatgttgagattaatctcattgtgcactgagagagaaagaggctgccgggacagagatggtgctgctggctgaagaccttattgagtcccagtctctgggacaacaaaccgaccttccaaatggtccttccatttgggtccttccaaatagcccttctaaaatgagctaagaaaggtactattctagaaaatgatgccctctgtctataaatgtattctatttctgtgacttcaatatcaatgatgattttcgtcatataattaaaagcatatctttataccatttaggtttatgtgaagattttattaattgtattatatttaaagaaactttatcctttatgaccaaaagtacttacaaactcattcaattaccataattgccatttcatacaattcttaaaaggagcttaatatgttaactatcttttttctgctggtgaccaattcattggttgctgcaagttagaagttttactcccaatgattcagatgaaaaatcagtgtttagaaaacaaaatgaagtgtgacgatgcaagattcgaacaagactaacttagcagcagcaataataattaatcaaatttaataatgataaattaaagagagatttcttaaatgtttttctagaaagccattgccttttttttcagaggttaaaaggaaaagaagaagagacgataatctgccatgtcttatggtactaaaacaaattttgcttgtattttttaaaattttaatattttttactaacattaaataatgccttccacattgtagtcattagttgatatgcttctgatctttccatatatatatatatatatatatatatatatatatatatataaaatatgctcattaggtcatgatatatacatatatatacatacacacatatgtgtatatgtgtgtctgtgtgtgtgtatgtgtatgtatacatatatgctcattaggtcataagttcactcagctgacagtgtgaagaggaaatcaagatactggaagttggtcctatctactgtctatctgcaaaatgaaactcaacctggacttcctataaattgagctatggattttgtgaaacagacttattatgtatagtatcaccttaagcatatgaaagacatagagaattatataggtatcccatactcttctgttgcaaattctttatttctcttttgactattttgtattcatgaaataaaatattaccaaaggtcaaaggcactgaaatatcaaaattactttctgagttgcgcataatgccacatgcccgtagtctcagacggttggatggctgaggtgggaggattgcttgaacccaggagctcgagacaaccctgggaatatagggagatcccttctcaaaaaatataaacatttttttaaaaaagtttctgaatcccaatttatcattgcatttgtgtgtttttattttaggacaaatgagataatctgataatataactttgatagtttattattgggtgtatggactagtgcttcttttgtagcattttgataactaaagtatcatattccctaagaagaatacaattttacttttaataaaagataagaaatattcttgttgttcaaacttgcaaagaaacatcagatattttgctgggttttgatttacttgaaaaatattaatattaatggagaattgcacacttgaattcaacaggcactgggcagggtttactacttggtaggtattttaatagactgtggaaaacaaagacaaaggggacatcagacgccacctgaacaagctcgcagtgtcttggaggagactgaggattccagctgagtgagggaagttttgaaaatgaaggaaggcattgaggcacacttgcaggactcggtggggaacaaaataactctatctctcaaaggacaaaataataggtaacacataaggtttttatgccgatttcaggaaataaagcacgtggcatatttttccgatttcagagaaatggagcatatttctagtccccaaatttaataaaaccgattactccaaatgagtcctgccccagaaaacatttaaaggaagatattgggagcatgatgcaagttagcatgtggctctgttgtctgtgctaatgtttgagcaaatttttgtcctcagacatttccagggactaaaatatagtaatatctgtttaaataaaatgctcatactcagtaagtatatacaatgagaggatgaaagagcaagatttcttgagtgtgctagctactctctcataggactatgtgctagctactctctcatacgactctcatacgactctctcaataacctgtgaaatggatgttatggacattttatagctaaggaaaatgaaggccgtgaaataattgagcagcttttttgttttttttttgttttattttattattttgagacaggatctcactctgtcatccaggctggagtgtagtgttgtgatcttggctcattacaacctccacctcttgggcttaagtgatcctccctcagcctcccaagaagctgggaccacaggcatgtgccatcatgcctggctaatatttgtatttttctttgtaaagatgggtttttgccatgtttcccaggctagtctcaaaaattccttgctcaagtgatctacctgcctcaacctcccaaagtgctgggattacaggcgtgagccaccgcgcctatcctgagcaggttcttgaaattaggtcaattcaattccaaaatccatccgaggccaggtatggtggctcacgcctacaaacccagaactttgggaggccaaggtggcagaatttcctgtatacaggagtttgagaccaccctggacaacataacaagaccccatgcctaatcacacacacacaaaaaaaagccaatagtgggggtgtacacctgtagtctcaactagttgggaggctgagatgcgaggattgtttgagcccaggaggtccaggcttcagtgagctgtgatcacaccactgcactagagcctaggtgacaaagcaagaccttgtctcaaaacgaaaaaaaaaggattaactcagtctcctaacactagtctcccaggcagtataacactgactggagactgaatctctgcttcataacgtcattactatgtgatttaggcacatcaattatttctacaagcctaattctctcatctgtaatggtaatccattaaagcttgcccaaaaaaaggctagttactgacacgtttattatgtccacatgatttacaaaattatcagaacaccaaactcttaagagcaaaatgaacattttccagcgtccaaaagcacagcatcggctacttcaatattagcacacgatactatcaccaacatgatagtcgcaaacaaaaaaaaaaaaaattaaggaaagtcacatttgggtaaggttcattgtgtgtgtgcttttcaaagtttcctattcaggcaggacagatacataagctctaagataatatcagtaaagtgaaaggtaacagccccaaatatatgaggcatttagcctgcttccaatgtgtagccctattttacaaggttaaattaaagtgctgaggtcaagcatttactcagatacctgaacattcaataatccagcacaaagaacaactacacatcactcaacgcttaattgctgaaaagggaaactgtcttcagcctatgtcttcaagaagacgtgtggggaacgtattatgctttctatgtgttatcctttacctacacagatcatcaaggagaacttccccaaagcttgtgaagtgacaggcttcatagcccctcattcattcaggccccaactaagttctgcaagaggatctaagagaccgtgcatccaatcctatgttagaggaattttgcaaaaataataataataataataataataagattactctaagtaaaaccagttaaatctgttctctccccactcctactttcactctggtgcacgtcagtactgttgcttggcacgtcgtgggatttttggagactgggttcaaggtgaattaagtaggcacttatttgagtacatttaggcaggttttttttttttttttttttgccacttctgtgcattatgaagttattgctagccatcgtaggacaatttggacagtcttctacgtgaactcaggtgagccatgacgcccaagtgcaggttctgagaatgtgttccacgggccagacacagagcaggtgagtggagaggatggcaagcgttgatgtggacagagcaagaggcctctctgtgaaattaacttgaaggaagttttctcaagtctgaccacagtgataaaaaaaaaatatgacataacaatcatggttcagttttcacactgaaaataacttgtcaataatagtgatatggattaaacaagtttgaccaagtatgctggagaaatgctggaattagctttctattatctctgcaaaaaacatgacaaaatcatcctcacacaaaaaggtaatcaaagagtctttagccaaagctgcagtgaaaaaacatgttcccagggcacgtcagaaataaagtgactagaaacctcttaaaacacattttttcttcttcttatatttgtaatattttagcctataaaacaagtaatttgtgatttcttattgtaaagaaaaattttatgtcccaaactaataatattcacaattttatatatatatatatatatatattattttttttcttagagggtcatcaaaattgtatgaccttgaagcttaacaaaatctggatcaactcctgaaaccaatgaggacagtatgatagcttttgcaaaggataaagcaaaagcaaaaccagaacatttattacaatttttgttttacaaattaaatttataaatattatgaaaccaaaggcaaacgccactgctctacttcctctgcacctgtctagctccagtcccatctccaccattagaatctacttactgtgcatggtgtcttgctctcagttaggagaggtagtcaaggaaatgggcatgtcctcaaaacacaacaaccgcagcaaccgtggtaacaatacagccatcacaataagcattaacattcgctttgtaattgagctcattcaagaaagctatcttcagtaaggaatttcccctatagagagcatgcacactttgattttacctgttgccagactgaccctttgttcattaaaatagtaaaaaacacacccctggttggagatttaagatgttaatgagacatgcaattcatgagcaagcatgtacagttaccgcacgtgtgcacccagaggaccacccagaacttgcttactggcaacacctcttcccatctccttatgaataataatgtaaaactcccataaagggagtctccatagtgctggtcattgctgccacatcctcacaagcagcaagccgttaattgtctctttcacggtgttccgtctattctgcacctcacttaaaaatattctttttcctttgcaaaaactactctatgctacacttcttttgctgtgtgtcttttgtttgaattgttctaaacccagaagacaagaacgcaggtatcacaacagctgtcaacatctgcagtcccatctccacactgtaatctacttcctgtgcacctgtctcgctccagtctcatcttcaccactgaaagctttgctctggattttttctatcacgaggattaaatgggtgttgcaactcaaggggagacacatccttcatggcttagacatttccaaagaccagcataattttacgttttttcaagtaaaagaaaataatcttgaattatcttgagacctcaaatatagaactacaagtagttttaacatttgccaaattaaaaaaaaataatcctatgatagattcctcaaaagtgtacctaaaatagatttctacatcctattgatttgttgtctgtatggggctatttacagaaaataaatgctcagtgctaaggctaaacaagacttcactattaacctaacaagagagtctaattgaaaagttcattgatcctttttcctgcctccaactatatgaattagtttcttgattaactagaattactaaggaagtgtctctgcttccacatgtcaattagaagtgcatagggctgttaaatatttaggtgctctaattcaaattcactgacaagggtttgctctggctctattctaaaggaacattattttcacacctgtcttataaatcctataaaattacagtgggttcctagtattcaacactgtaccatacagatgacaatttccaatatgatgaatagggtaattagaagagtcaatcatgaatctcccatttggtatgaaagcagcttagtggaggccatttgtgaggtatttattatttgaatggtataggtggagtacagccagtggtcattataattaaacattcaaggacttcttaacatattgattaaatgtgattcatgaatcacctagacattggctttatctccaaatcactaattcagagacaccaacaaagtttcctgttactaagaaaatggatttaattaaaataattagtgtttaaaatgatcactgtgcttacaacaacaaagagatggtctactgctttctatttaaattatgtaaagtaaacctatctatgtttattaacatagatttatgtttggagttacaactgagacaatttataacacaagggaaatattttatatattaaatgaaatactgtgtgattgtgggtttctgtggccctattaacacaacagtgtcaatccacaatgtttaaatcttagcagacaaaaaagaaaaaatcaatattattaggcctattatcaatttaagtgtatctatccttagggaataaatatgatcctaaaaggatataagcacatgaaataagcatatatggatttacctttctaatgcccatatatgtaccatttagtaaagtctcaaaaagggaagaatcctatcctaaataattactatatttgagacacacatatttataatccaagtatttgtatttagttcctaacttgtcaatttatttgcttgttctttcacttatttattcattcctaattcagtcatttaagaaatatttcctacggtcataactcttcacactccagttgtacctgcagtgtgagccacagctctgacctggcttgttcccttccagacaagtcggatgggaatagtcaggttaacctcatcccctgaaactctgtatgcacactcaggtgggagaggcaccaaccaataggcactttaggtcccacttgtaaaagatagtcctgttaacctcccctattactgtaaatcattcagtgcagtgtggtttcttccagaaaaagaaaggaagaaatgactgcggagcgctggactcatgtagctgctgatttccatttacacctctgatggtaacttcctgatgggcccattcttggggcttgagtaacaagcccaatttgattcagtcaatgtaatgattaagacacaacaaaaacatgatctagagccctgtgacaaacatcttccaattctatagcctggttgctgtcaccaaaatttctcaaaacagtccttccagaacttgtatctgtctatgagtgacatcgccttgggaaaaatgcataaatgtatttccagatttccatatactcactttgctgaattagcaaaacattaagactaatagtccaaacagatgttaacaacagtgattaatcttcacatggaaaatgctacatgtaatgtctccaaaacgttgaacacttgggagagaaagtaaattcaataaaaggctaccaaataaggtcttgaatattattactattattattattattattattttgagacagagtctcgctctgtcacccaggctggagtgcagtggcgtgatctcggctcaccgcaagctctgcctcccaggttcacgccattctcctgcctcagcctcccgagtagctgggactacaggcgcccgccaccacactggctaatttttcttatttttattggagacgggatttcaccacattagccaggatggtctcgatcctgaatatgttttttttaattaagaaatatacgtaaacagcaagtatattgtctgagagtctgaattgatggtctgattgtgacatcaagtttgaaccaaaaataaatgtcaggaaaaaaattttaaaaagcgcttgtctatcacctaattctatttgatgtttggttctccaataacaacctctatctcacaaatcatgtcatcaatacccctaatgaaatctgcttaacatgacatcctagatagcaattctagttttccatttctcttgagcaacttacttgctccctggatctaatttttgtcttttattaagggaaattattgtactggaagtttccgaatgttcctttcaatactggatgtattcatgacagcactgaaatcacagagacccagtgtttttaaaacaggagtctgaatttcaacgagacaagggttagtagcacaatggtgtcaagaagttatcaaaacaaaggagtgagatgacacagcctaccctttctacagagacaacggtcatagtgtgactagcaattttaattatctacacttaagagctgtgtgcaggagcagtcaaatacttgggtcaggtttctcttataagcagtgtgctctaacagtgattcctacatttgaatacgtgtgggccaattataaaacaaaatgtttctcaaagacctgttattaacttttaattcaatttatgatcttaaagtcatgcatatataaactaaatttttatttatgatcttaaagtcatgcataaacttggaatgcttaaagcctgtgtacactataagttatataaataaatgcatacaaaactacctcagtaaaaaaaaaaaggctatgcattttaagtaaccctaaactgcaactcaaaatggactgctgtaacacaaattatcaccataatcgttaataatagaattattattatcaacttcctttatcatgcccataatcccgtgaggaagccctattaaagttactgcaaaagcctcctccatgaaacattctgtgatatcatttgctttcctttggcccagatgggctatttgcttcgtaagttcatctccatcttttttctcattagcctgaggatattaaagtgctgcttcttatagcctatggaatcttggccacagaacaagtaaggtggccatgtggatgatacagtgtatgtttagatatagttatataatcaccaaatgaagacacaaaatcaaaatctagtcacggagaactggagagctcctaggaggtgcccagatccccagtttgacaatgctattcttaccacctaaattatgtacttacaaacaaggtatggagggaaatatattacaatcgccctgacacccaatttctcaccatatagcagagtttctaccagctgagtcaaagtggagtcaactataagccatcaatccctgcaagccatccagcaacaagcttatgagtatggaaaattcccctacatattgagaaaataaaaatagctcagataaaactactgcaagaagcatgaatacaaccaaaaaaaacccaacatttgaacaattcaaggacaactactctgatgttatgtgagctatgtgtgtagtaaactctctgttatatggcatgatctgttatggggagaaagaaaagttactaatcaagtgccattataaagtgttaaagtttgtgtgacatgtcatcaagtaagttgaataatattatggatgtcgcatcataattgtacaaaacctactgttccagagaatacctgagagtctgtcatatctttgggttgtcacaataaacataaatctatcctgtaatggaatatgaagatagaaaaaagatttgcctgggggctgaatgtttactaaatcaaaggtgcacctatcactcattttgaatccacatgcagacctggtatttgttggtttgtttctcattcagagttcagaatggacaggtgtaggaattcctgagcagaaaatcctacttttctgctattgaaccactgtatatatatttgaggaagaccttctctaaaacattaacatcttccctaaatttaattaataaatcatcaattatttattgatttctcaggacatagctgatagccccaatactctgttggtccccttaggggttacagtcattttaaactgtagtgactctattcaagaacctctgccctcaaaaattttatgggaaaaataaaaaacaaatgggaccatacagtacatatttcagtgctaaaatatgtgctagaagccacaaaggtcgtacgcgtccaggaaaagaaaacaattgaggtcaataaaatgaggaataaatagagaagggttcatctctagttttaatgcataagtactgactggcgccatgttaggtaacaaggacacaaagattgccagtactgtcaaaggtgcttacggcctaggacaggaggccaatcaacaatgaacacaggacggacaagagcacaggaaagttggcaccagtgtgggcagccaagggaaaggagctccccgccctgctaagaaatggcactttcaagtacgctttgcaaaagaggtgctacttcagagcaggtgtgagtttgctggacagattctccgccctggcacaaagagtgactgaacatgacccatatgggtatgctgattacttcaacatgttggccacagggattgtacgtggggagatggggtggtattgatccaaccgcagaggtgggtagaaactagacctggaaggaccctcattttggatgctgtcataaggaagtggaaaaacatctaaggacattaaaaagaaggttgttgttgtaaaatttctgtttctcaaggatcaatatagctccaacataagtatgtagtgagaggaaaaggttttggaggctgagaaactagacaagaaggtggcttttgttataatctgggctaaatatgacaaataactgagcaactgtcctggtaggctggctgaggttagcagttggaagggctgtatgaccagctttcagggcacagttttgacctgactggaaggtgacagtggatagcacccttcagtatgaccctaccacaggtactgtgtcctgaaaatgtccatttcttcagttcctttactccaaaccctgagcttaagaacttgcttaaaacatgtctttaatgtgtaaaatatttataacttaattcccatgggaagggtagttgctctccactgggcttgttgagctgcagctacagctggttgacaatgcagctgggtgacactagctaggtgacactgcagctggccgatgctgtagctgggtaacactagctgggtgacagtgcagctgtgtgatggtgcagctggttggcactgtagctgggtgacactgcagctgggtgacagtgcagctagatgacaccacagctgggtgacagtgtagctgggtaacagtgcagctgggtgacagtggagctgggtgacagtgttaacagtggagctgggtaacagggcagctgggtgacagcacagctgcgtgacagtgcagctgcgtgacactgtagctgggtgacagtgcagctggatgacactacagctgggtgacagtgtagctggttgacagcacagctgtgtgacagtgcagctgggtgacagtataggtgggtgacagggcagctgggtgacagtgtagctgggtgacagcacagctgcataacagtgcagctgggtgacactgtacctggttgacagtgtagctgggtgacagtagagctggatgacactacagctgggtgacagtgaagctaggtgacagtgcagatgggtgatactgtagctggatgacactctagctgggtgacagtgtagctgggtgacactaagttgggtaacagtgcagctagatgacactgtagctgagtgacagtgtagctaggtgacagtgtagcttggtggccctgaagctggatgactgtgtagctgggtgacactatagctagctgccaccgcaactgggtgacagtacagctgggtgacactgtagctgggtgacacagcagctggttgacactgcagccttctgttccagagcttgctcttctcatttccgagcattactttttcagccagctgcatgccgtgctcaggcgtttgcttgatctgagtcctcgtgcatccaaacactatggattattaaatacaagaaggtctataaaggacagaacagagcctgaaactttatgatttttcattattgctagctgtcatagtgttatcattattgacattactttggtaataagatggcttttaataacgattttgtagtaaagaaataatttataacctggagtccaaggttaatgtgtgtatacttttgggggagggtcatgaatgtactgataaccgtggagaaatagtatatcctcagcatgcaaaagcagagaatttattgatcattcttcctggccaatagtatttttatttcaaatgcttagtaatgttcttttccagttgtactgaggtttctttgatttttccactttttccctttttctttctgcatcagtgacactcttgctagcttcaacccaatctccaatttaatttttttcaaagtgtgttgattggaagtgaagatgggcatatttcagtaaaccttcatcttccctgaaatccgtgctgatgcattttttggtcttactctaatgacttcaaattattttccacttgatagatctcacacatgcattgtcagttctgaaccaagggagccacgctttggaacatgtacaccaacctgccgatcacgtttgctcataaagtagagtcctcattcggagagccttggggctcagatcttttgatagtttctctgaaaaccaccgaagtaaaacagtatctggctcctccaatttatgttcacagaatgtacttctgtttaacaactttattagattttgaaatggcaaagaatggaacaactgtctttatgtaggcttaacgcttttcgatgtgacaagccaacataatttctggcgtcaaagtgtggtttattaagctcttggggtgttcacaagtattctttgtttgcatcctgatattaccatggttttattatactgtactcttctctagtgcttttcccattagatcattttagatctcatgccatgatgtgtgactatgaacaagaggaccagacatgtatttcagtgcttagtattggctttaaatggctgtttctcttattctttccctccttttcctcttactctattccatttattatacgttgttcttcttttgcaatgatttgtacagattgttgccagattcctatttgtcttgaaaaccagcctgaacacattgctaagccttaatatgacagaagtaacacaacaatcttcaagcactgtagcaacattgctactaataaaatggagaatctcacttctgatacttcagcattttctatgattttcagcccattgaccacctcccaacccacattctagggtccattgattaagtcatgccctcacccattactgtcaaatcctgttactccaactattacccagtaaggagttttttgtttcaaatcttggcttttctgtttacaaaaacatgtgatctgaggcaaattgttggatcttcctaaggcagcagtccccatcttttttgctaccagggaccaatttcatgaaagacatttttttttccatggactcaagtggcaggggatagtttgggatgaaacttccacctgagatcatcagccattagattctcacaaggagctcacaacctacatccattgcatgctcagttcacagtagggttcacgatcctatgaaaatctaatgtcgccgccgatctgagaggaggcagagctcaggggtaattcttgctcattgccactcatctcctgctgggcatcctggttcttaacaggctgtggactggtaccagtccatggccccgggattagagacccctgctgaggtacacatttctttgtatcaaatagagtagagctgtctactttgcaacattttatgagaattaaattacataatgcactgactggcccatcttggatactgaataaatagtagctacatccaactttccttccatctaacagccattgatcatcctgatcttaaccacttatctctttctccagtttccagctctacctccctgaactcagtagactctgacctcctgaacatgcattgttttattctttctagtcttacgatgaatgcacgtttctgtgttattaaagtagcgtgtagctgaccacctggattggataactgcctgctgtctgtattgctgctgcttgtctgctgagctaggtggagaccttcttactggcactttggagaaacctgtatgagctctgcattccatttagcgattgagtattaagtgttcttcttacccttcagtgtgactctgcaccagtggcctctaaaatttactccttgtctctgccatgtcgggtcagaactggttttcttgcctctgtcccacccatgtgtttttagaatatccaggatgaattaatctgtccagctaaaaaaaaaaaatgtactcaacctacagggttcaacaaaacaattgcactatgtcattatcataagctttccaatgccagagcattaatattaatgtgatattaacatacacattatgtaaaatattactctcaagaaagtctaaagtggtattatcgacagcagagaagtgtgcttctcatatacagatacagtaattgccggcattttgtcctgtttctgaatttcaatgtgtagaatattacggtgcctttttcttcatacttagttcactactctatttggcaactttgagtaatgtgtcagaaaataaggttcttgttccttacaaattgaccctggctgtctaatgatgtgattacacatcagatacagcatcctgaaagaagccaacaggacatcatcaactttcaggtgatggactttgccacctcccaattgagtccacatttgagcctctcggatcagtgttccatgggtcatgttttcttcgagctctgaggtctctttagtggtcttgtttgttagggagtcattgccatatatatatatttttttacctccacaggacacgtggcacactaccatgtacctctttggttcactatttgtttctcatttggattaaacctggaataccttgttctgtagtttcttgattaatgtcctaccgtcctatctgcctatctaggtgggtctaatgtcacttcctgcagccctgatttcctgcaggtgtgatatcttcagtcaaagattgtacattattttgtttatgcctaatgaagtaattcggccttgtaattatatttggataaatattattttcactttgctacaatacatgtttctggagaaccggcctgtgtctcattctgaagtaacttatggatatcaggagctgagttagggtagagacgaatagcaccttcccttaccaaacaaatcataggttcttcctggaggacacccctttctttcatcccaacatcatcaagcccagtcctacaaatagaaaatatgtgacagattcacactaactctttattgcaatggaaacctctttattgcaatggacctatgttagtgcttctcaaacttgagtgtgtctaggaatgtcccagagatttcagtaaatgcacatttggccatggttgttctacggtgcggcttggtattccacatttctaagaaactgacaggtgataccaaagctgttgtatgtgaaacacactttggagagttgggaattaaattatctcaaatatattttttatttcctttttctctttctttctttctcgttttctttctttttttttttttttgagatgaagtcttactctgtcaccccggttggactgcagtggtgctatctcagctcacagcaacctcggcctcccgggttcaagtgattctcatacctcagcctcccaagtagctgagattacaggtgtgcatcaccatgcccaggtaatttttgtatttttagtaaagatggggttttaccatgttgaccaggctggtctcaaactcttgacctcaagtgatccacctgcttccgcctcccaaagggctgagattacaggtgtgagccactgcacccagccccaaaatacgtattttccttatctgacatttaaggtcaaagaggaagaagtaccaagttacaaatatagaatactcttcagctagaacttgtactggtgactgattttctctgtggttccttctccataggacctatgtgtatccaaatgtctgtagggaaactgaggcaattttaatattttccaagaaattcagagagaatccttccatttaaagaatgattaataacaggcaaacatagaaaaaatatgttcatataaaagataatattttttctgcataatataatttttcaaacaaaggaatatttagattatattctttcatacaagagttagggaaaatattcactgaataacttaaagaaggttagtgacaggtacctgatcttaaatccaacataaaagttgatcatctaaaaaaagttctttagattttcttagtaactgtaaatactggtaaggccacaattaaccaggcaggtggcgtcaagtcactgtgcaatgtaagaccccccaacacgggtccaatgacggtgactttcctacgtgtgaaagatctctgtgcacctgctacccagcgtttctcaacattcagcatgcattcccatctcactgggagggcttgtgcaaacacagatggctggaccccacacccagagtttccacttcagtgtgactgaaaatttacatttctagcactgtcccaggcaatgctcatactgccagtccaggaaccactctttgagaaccacactcagtatctccttatccacatccaagtccacgcagataatagactcgtcttaaaattggatgctcatcaccctaaaccttgctcagaattcttcaccaccctctactgtagttaacaaagtccaaacatctgggcctggcattctagttccttccggactgtggacccaatttagcagaaggtttctgatctcttactatttatttgctcctttgcaatgggccaatttataaccatgtttttggtgcccctcaaccataccttttgattttatcaaacctgttcttttaccagatggttgttaggcctggagttctttttattttccccgcttttcaaaaccctaaatagcgagaggaggtgaagagactcacagacatgctctctctttccttcccatgatgctaacctcagagttgctgtgggaattccttccaccccacagtgtaccaggtaagcatcatactacctgcatttgtgatatgggttaatgtaagtgaatcacaagtgcttcattatcttgattgtgaccacaaaatgccatagcattgcattaagttacaatgtgtgctgcttcaaataaaatcaattgtcatagggaaaaaaaaaaccccatgaaacatcaatttggtgtactaattcaaaatcccaagtatacctgagtcacctatagtatggtctagaaatatcctgtgaaaaatgtaatctgtttttaacgaacatgatatatagtaatgtttaatgccttagaaatcatgatatgaattctgaaaagacataatggacaaagtgtatccgataagagaatgaaaaaacaaggttgtgctcactgtaaagagtgaagacaaggttttaggcagaaatataagctgtaccatgaggtgtgggatatcatcataaaaggtaatactctagaatctaacaaacctaagctttttttttttttcagatttgcaaagtacaccttgcacagcagagagaaaataactatgttttatgtaaaaaaatgtgaattcattcactggctgatagattttcctcatctttgatactgtaaattcctacaagaggaaaaatgacttttatattgaacatatatacagacaaaatatatatgaatacataggcatatatcaagaaggacagcattgtcattttgtacataaagtaaaagtattagtaccaagtctttctaggcagctccaacattatcctgaacttgacaagtgaaccttacccatcagagtactgctgggtaataccagttatcagacaactgaaacgcttcaaacatgttgtaagaaggtcttcatattgccctttcatagatgagaaaaatggctgggagagcttactaaagtttccaaatgtcgtagctagtaatcacatcccatgactcaaaatcccttcttcttcggcttcccactattcataaacattacttttcatgttacgttgtgtattactttaaacggcacacacgcatgttacctgaatcagcgatctgatctcatacagcaaataaaaatttcttggaaaagtggaaaaatatattcaatttgatcgtaagtctttacatgcatttttaagactttttaagaagacattaacgtggatggtacatatttgctgtttctaaaagttataattagaaaaaacaaataagttcaatctttttgggaattatctaaatggggtaatttaggtcttttattatgtattccccttagaatttttagagataaagcaaagctgtcgaggtacactttaaggcagtatggtaaaaaatgttacagtggcctattaagtatcatctcacagaattgtgcagatctttgctttatttttaaggaatggcccagccaagtgtgagttaccagtggttgtgccaggtacaggccaacatcatgaaaaacaagcctaagttcaggctcattgatgagatgccacctttcactttgtattaggaagattcaggcagagatcctgagagcaatgtggacttctgtggattgctgccctgagaagtgttatgtgagtaatctcagacctgcctgtgtcagtcagtaacagactgactcttagaatcacccgctgctcgtatcaaacagcccaagatatctcttccgtagttcttctcatcatcaactctgtgctctgcggtccaggcaaataactttctctcttcttgagaatatttcagggattcttgtcctctggaaacaacatgcattcactgattgatttttttggggggtgtggggagagtggtaatttgctggggccagaaatgtgctctgatatgttcacagtttcctctttctaccaggaggactccataggtatttgaccccaaagtctgactctcaaattgcagtcactggaggtcaaagccctaatgtctgttgaggctttatggagcccctctgagaataacaaatacatggcaatcactataaacctgcatttatgcatcaatgaccatgggccaggctagatactaagcacataatagtcattatcaaatttaatttgcataacaattttaggagatatgagaaagctgagtcaggttcatcaagaaatcttcccaacatcgcatatatcatgaaaggaaatgtgaagatttcaacaaaatttttactgaatattttatgctattaatcattatggatacattttcccaatgggaatctgataaatttgcatcagcattctgtgggaatgtaagcacaaaactttgctcgcagattttcggtgcacacacattccctgggcctttacacatccagtatcccctggtaaaaaaacaaaacaaaacaaaacaaaaaaactcctaacctaagggaaacacttttgtagctatggagctcacatttgcctctcccttgtttaatccctggaacatacttttaagaacattgcttaaaaaaaaatctgtcttattttttgtaattgctctgcagggcctactccaataacatgaaacaactctggtgaagcaatcgcttaatagcaggccagaggtctcaaagatattattaatataccttccaaaggcaccaaactggcttacaggcattaggggcaattctggattcttagctattatttgaaacaggatctctatgtgaggaccaacgacattttgacttctcaaatgttactgtgaggtaatataataacacaccttccctaagaggaagatcactcatgcatctatcttgctttgcaagcgctggcaaacagggctccttcactactgttctccttcactactacttcactactacagtgttctccttcactactgtaggaggcttgcctttctttttcacattgtgggtgaaatgcggggagcagctgagaaggcctttggagaattctagtgaacaagtccactgggctggagacaactaaagcaatattctggagaggcttgaagtggatcgtgattggtcctttggagactgggtcaggctgtagctaagatttgtggatgtgacaggctgagacagttatcctctcaacctcgtcctggcttggaggagatgtagacccaaaaggtgtcagtgttgaggcactttccctcattgaagtctgtaacttttacttctcctagggtgattcgtgtgggcatccttgctgggaaatgccagtctgactcacattcgtcaggaggaacccagaccaaatctacaggaaaaatgagctcaagggtgccgagggcaggatacgcagaaaaaggcagaacacacggcgtgctcctgagacagcagtgcggaaatatccagagagctttctcccagaagcaggaatgttcccacagcgtggtcgctctccccaggtatttcaaccctagggaggtgggtgccttttcgtggcatagagggaaaacttctaataaggccctctgttaggctcaggagcttgtttgtgctgcaggaatgggtgaagagtcacctgggaaccctccttttcctaacatcatcattcctccttcgaaattcttgcggcttgtgtagcaaaggcaaaagtttagggaagggggtcttgactctggagctaatacgaactcgacaaatttgaaaagtgtttaataattctcatcacaattttgcatggtgattgtaatagaagcaccacgtatgtcctgctgtatacaagttgatggaatgggtacaaaatcgttaaaagactaagccctgtattaaagctgcttggactctaattagacaaggaagaaaaaatggctttttgactgatatgcagacaacacttgggagtaactagaatgttcctccatttatttataaataaaggtaaataattctttatttttctcttaaaacagaggcatcactagagcaaagaccagctgctaacatggcattggggaaaggagaacggaacatcaactgtggataataacagtgtgtgagcttttcttacaacttatgtcggacacatgttacatcgggggacaaggaattttataatgcacggaaaacaatgttcatgcagttcagtgaattgtggggtggggaggaaaatatgtcagaggcgtttcccagctgctcagctctctcaccacgtttgaaaatatgatggaattcagagcatgcctgtgtcctgcaaactgacgacagggtggcaggtgcaccgaggccacagaatgcaccaggaagagactctgaagatgctgccctgtctgccgtcaagacgcttaatcccttcataaaatcacgaaatttaagtgttcaggttttattttgttcactttatattttgaaagtgaaccaagtaaacattatacaaattttacaaagaagtcagattcaaatggtgccttcagaataacttgagcagacagtattatgaatgcattatttttgggttctaacacagcaaaagacagatgattttaatataaagctattgtgcttaataagaaaacagactgatattgctaaatctataatctattttcccctttgtatttgcatatgcttcttcagaccattaaggatataaaaacacaacgaattcggtgcttctttagagattgtagtgccttctctccagagtacattattacaaatataacttgttattggagagtgcatgctacaggccaaatctctatcttatttctgccttccttggatgcaatgaatttcaagagaactggaaaaataagtgcttcctacacagtatctacacagaactgttattagcttgattgatcacgaccaggaacgctttcttgggcatatttctgtagctattacaagacagatgtggccaagtcctacttattcaggggctgcccagctagccctctggggacactccagaactctagaaattggagatgaccagaaaattctgtcaaatcaccttggcagctgtggtttactggacaggttgccaatcacaggactcaaagagctctcagaaaatcatataatgcaagtgtctgcttccagacgggtctctggggactagatgtcagcatctctcttgaatgctcattccaaaatcaaatcacatcattctttaggtcatttttcttttgtttaactgaagtctctataatcatagatccttttttttttccttattgaaaggctatatatcctagctaacacactgaaaccccatctctactaaaaatacaaaaaattagctgggtatggtggcgggcgcctgtgatcccagttactcgggaggctgaggcaggagaatggcgtgaacccgcgaggcggagcctgcagtgagccaagattgcgccactgcactccagcctgggcaacagagcaagactccgtctcaaaataaaaaaaaaaaaaaaagaagaagaagaaaacgaaggctatataacaccagctggtctttatatttccagtttctctgccatccaattcgattaataactaggagtggctttcataatcacctctttcacatgtcattgcttgtcggagctgccataagcactcccaggctcgcctatcaaactccagaacttcctcctttattctaagacttttccatcagaaatctctcatctcaccagcctcatttctcaatagactgaaacttgtaaattctgtctaattaaactcattttcttagactgccacaaacaaaagattctccttcccatctgtgttccatcttcttacctccgttatcttttctcaccatcattttccaaaggattctcctctatgtgttttccctatatgtccacctgaatcttacatcttcccacaagtttcctgaaccgataaaaatagttcaaaggatcaccaattgtcatatagacacatatggagtatattttctttaaccaccttttatatttgactgagtcttttcaaaccctaaatcaataaatataacagcttgtccaattctgagactgattttctatttttatttaacctgattaatgggaacttcacatttctcatgaatttgtaatgatttcagagaaatcgttttctaactctgattcgacatacttctataggggcatgaacttactgggaaatatcactaattattcaaaaaacaatatacggagggtgaatattttatattttagtgatatttgatacgtactaatcaatctggtttcagtcaaaacatgtatttaggatttactacattcaaggcaatcttctagccaatttgggtgcagggacaaatagggtgggacgatttctacttagagtagaccagggaagacattcctaaaccagagaggctgcgtgctcctagaccctcaagtgaaacatattgcatacaatggaaatacataacagagggggctggttaatcttagcttctctgccaaggtggttttggagatgaaagttgaagcatgatagaaaagagagagaaggagctaaggtgaattgcacccagtgtttacaagcgtcctcaagtggaaaaaagtggagcatgtttgataaactgagaaatacatgcagaatacgacaactgatgggatgaaatgtccaagatgagcctgaagaggcagactgcagtctgctcttgtagctcaaggtcacacgaaggcatgcaatgctagctagagtaaacatggtaggattttatgatttaaattatattctgttgagagttctggagggggcgtagtagtgatggtgatgtaagagtgaatgaagatcaattaatcagcagctatggtggtcattcaggtaagagaacacagggtgtgaacatggattgagaggagtaaccaaatgtgaggaagacacaggaaagcctacgcactggtgactataatgagctaaggcgtggagagaatcgtgactttagcagcagggcaacatggcagcactaggaaaggagcttttggatggtgtgtgtctgtgttgcagtggtcatgtggggttttggcaccttgaaatttgaagtatccatgttacatcgacagggagatgttgagttgagaaccgaatatattggttggaggtcagaacagatatcagggttggaataaacattcaggaatccttggcacgagaatgacaatggaagccatggggaggtttttgtcaaaggatcctgtgaggaccatcgacctgctcaggagtgagaatccaaggccaatccgatatcagaacagaggaagcaacaagcacaaagggaaatgcaacttccagaccagaagaagcaaaccactgggatgtgtcccagaagcaaccagcgaagggaaatgtaacctccagactggaagaagcaagcccttggaatgtgtcccagaagtgaacaaaaatgtgtttcagaaaggatggagcgagccctaggtgcaagtaataataaggcaacaaagaatacggtcagtgagttccagtgcatttgcccacagatctggcaagaatgtacttagggaagtggtggagtcatccagcattgagacatttgggtcagggccatcgaaatatcaaggatgcaaactttcaggaagtttagatggaagcatgcagggaaggcaggagtggggaaggaatgtgggtcacaggatgagttcttaaagagataaacaacttgtatcttaatgctgggcaccagagtactagagtattagaaccaactcagacggtctaatcaccttgactttcctgtgtgtgtatatataatttatgattacctcgactgttttttgtccagctgtataaagtccagttttggactcaaataaattaacgatcacttttgacttcagataaaggaaagtactttagccaatatttaaattttgtaatactttgttattcttgaaacccttctctatacttctaagttaaagaaaaagtaatattaagtggaaatgatcacaataaagagtcatatttgaattatgtaagtgccttgtcttcagcgttagaattttatatgaatagagtatgatgagaaaaataattcagtcagagaaaacaagaaaaagtacttttaacccccaaaaagaggtaagtaacttgagcacctgcaaaagggctagaatagagtagataagagctagttagagaggttgcatactttggagagaaagggtcacaggtagctcatggtttttaagaacgaggaagagaatggggcctagagggtatcaggatgtgtcccattacgttggatagatgtaaaaacatacgggtacagataaagatgtttggtgcaagaaaggagagacaaccatgttctaaatcttctatttctaacgctaattattattatatcatgttttgagtaaggacagtgtgtgtgcaatctgtgtaaagtttaatttttgtagctcctaactaaagtatcaatagtttccactgttgaaatggcagtttactccttaaaataaaataaattaagaaaatagtaccagctagcattaaatgaaactctttctgtctctcagatctccacctagtccacgttagtatgcattaagtcagcttggttgtcaagttgaaagatgtctttattttttgactatccctttttttttcagatcctttgacatgtatctgtctttgctcattcttcatttttaccggttaattcctcaacaaagatttattgacatctactctactgagtgtccttatgctagaatgcaaatacttccaaggcacacatcatacagttttcagttttatgctgctgaaatcttacagaataactcaataattactgattgaactaaacacaacaacaacgacaacaacaaaacagtattgcagtgtgatgaaagctgaacggaacagccttcacacacatacaagtgttcaggatgaggagattctacaaacacatccagggatacaggcagggaatagttattgaattaattagggatcggaaaagccctaataatgaagagtcaagagtttaggtagcaggttgggagtagtagttcacgcctgtaatcccagccctttgggaggctgaggcaggaggaccacctaaggtcaggatttcgagaccagcctggccaacatcacgaaactctgcctctaccaaaaatagaaaaattatctgggcatggtagtgtgtgcctgtagtctcagctattcaggagtctaaggcaggagaatcatttgaacccaggaagcggaagttgcagtgagcttagatagtgccactgcactccagcctaggcgtcacagtaagactctgtctcaaaaaaaaaaaaaaaaaaaaaaagagtttagcatagtaggttcggaagatcacttcaaggacttcagggaagtgcaggaaaggatgacatgaaacaggacattactgggctttgttgatcatacgatcaaattctagctttaaacacaaggatgaataattctataatagtcagacatttaatgggattattactgaaatacttgaaaagcttatcatataattatatataatttaacagaacctgtgtacttcataactgatattactaataatgtagaactctatctctgttataatttattggttgaatgttaatttagctagcagctcaaattatgaactctctcgctttccattgcatctgttcctaaaattttcgtatcaattttattacctttatctagtatgcattttggggtttaacattttacatatcaccccaactagaaacttttcaattgtttttgaataacaaggaaattaaaatcatataaattgtgtgagttatctgaggcagacctacataaactggctccaaactttaggtaaacggactggaagcatttgagtgagattcataagattgatataatgcaattagttggaaaatgtcactgcagacacaagacaaatgggtaacataatactttgcttttcaaagtgtctgctctggaagtctttgactcaatgattctgtcaaaaaagataacatgccagtaaatttcagtgaaaaaaaatgctaaatgctctattacttcaagaaattgaagacaacaatacaatgatgaagtagagacttccagatgttgccaaccggtcatttatgaggtgtaacgaaaatatatacaacaggagcccagaaagcttttgtggaaagtctcatataaaatcacctggttctcagcactacgccggatatttatatagcatgaatattgtcagcgaatatcaagcctctgtacataggaggtaattccatgatgaaataactctcaatttctaaaactgtcttaacaaatgacaaaacacttatatgaaccatgacattacttatacataaaggcttgttagcttgaaatttctgataaatgggaattaacttcctacttagggatacgcctaggttgaaacatttagtatccgattatgtatgaagtatgattgtatgaacattatgtaggtgacaatatgaactttagtaggcgactgcaaatgtacttaacatataggtaccctgacaggcaacccggatgtattcatcacctgatgtaatctgtgtagtttcctactacagtcatcacaaggatagaaaaagtagagataatcattgagaatgtgtcacaaaactagagagagaaaaaataattgagtggctcaatttcaaaataaggctgtgaagatggattatggggggtggtcttagattgctgcaggttagagagataaggacttgcaccaaataaaagtccctagctggtcatgaaacagaatgagacatattaaaaaaaataacaataataatctgcactaaaagctgctccttctcctccaatttattatttcctgaggcaaaatggtgaaactccactgccctatgaagcattgttgatactggaaattgattttattttcttcctctttttgaatgttacataatatgtttcttaagacaccaggcatttattcagaattttaaaatctttgtcataaaagatagtctaagagaatgagtgcttacctgctgcacagaggaataacgattacaaatatttatggagcgcttaatctcagctaagtgtttcccatgagccatttcctgtggttgaaatgcaaccctatgagatgctgttgaatgcatgaacgaactgaagttcctgaaattaggtgatgcgttgggagtagcagactcaggagtgaatgctaagttttgcaaatatacagtccactcactttgacacttcaccgcactgcttccctctacaggagtttgggtttggttataccacgaaacacacacacacacacacacacacgctcatgcgcgcacaaatatgtttcctgctactatggctgaaagttttgttaaaagataaacataaaaaatacacaaataacaaccaatgttttattacctggaatgccttttttgaaactgcaaaatatttgcaactagttgacataaagttcagattggcttcatatttatattttacctttttcttaaaaatgcttattatggtacgactaacatgcaaaaagttgtacacatgtaatgccatgaactagattgttttggagatacgtatatatccaagaaaccgtcaccactctcaaggccacagacaaatctaccacctgccaaagattccccccacacctattattagttttgccattagcaatattagttgtgtgtatgcggtaaaagcacataagatctacatgcttagaaattttaggcctttaaaattttacttaaattttaaatgaaaatttaaagttctcagtgtgttttttaagcatttaaaatctaattttaaatgtttaaaatttaagctggtttatttcatttaccacgatgtcttcccgattcacgcatgctgttgcaaatggcacaatttccttcttttttaaggggtgagtaatatttcattgtatattccactttttcttcctccactcattgatcaaagtgcatttatgttgtttcctaatcctggcaattgctaatactgctccagtaaacatgggagtgaaagtgtgtgttcaaaatcctgatttcatattcctttggataattacctggaagtggggattgctgggtcatatggtaggttttgttgttgttgttgttgtttttagcagcctacaaactcttttcataaggactgagccaatttacattcctaccaccagtgtacagagttccttactccccacgtccgcatcaacacatatatttttatataatggccatcttaacaaatatcacgtgatatattcttgtggttttgatttgcgtttgtctgataattaattatattgatcacctttttatatacctgttggacgtttgtatgtctttgcagatatatctacttgggttatttgcccatttttaatttttaatttgttttctattgaagtatatgcatttcttatatattttggacattaaccccttattgaatacgtggtttgcaatgtggaaccagcataaattcccatcaaaaacgagtggataaagaagctgaggtatatgtttatatgatggaatactactgagccataaaaaggaatgaattaatggcatttgcagcaacctggatggtattagagactattcttctaagtgaagtaactcagcaatggaaaaccaaacattttatgttctcattcataaatgggagccaaactatgaggatgcaaagataattagaatgacacaatggactttggggacttgtggggaaagaataggaagggggtgaaggataaaagactacaaactgggttcagtgtgggctgctcgggtgatgggtacatcaaaatctcacaaatcaccactaaaaaacttattcatgtaaccaaataccacctgctccagaaacacctatggaaatatttttaaaaaatatgtggttgtaaaaattttctcccattccatagggtgatttttcattttgcagattgtttcttttgctgtgcagaagattctgtgtttgacgtagtcccacttcttttgatttggttgcctgtacttttcgtgtcatatccaaaaaaaaaaaaaaaaaaaaaaaaaagaaagaaatcattgtcaagatctatgccaaggatttttaaaaaatgttttcttctaggagttttgcgggtttgggtatcgcactgaagtccttcatcaattttgtgtggtctaacacgtgggccagtttcattcctctgcacgacatactcagttgtctcaatctcatgtgttgaagagactctcttttcccccattgtgtctttttggcatgttttttggttagttggcagtttttgcttgagttcactttctggctttctattctgtattattggtctatgtgtctgtttttattacagtatcatactgcttttattactgaagattggtaatataatttgatatcaggacatgtgatgccttcagctgtgttattcttgctcaagattgctttggttatctctggtcttttgtgattccatacaaattttatgacttttttttctatttctgtaaaaatgccattggaattttgatagagattgctttgaatctgtagatgactttgcgtagtatggacattttaaaaatattaattattccaatccaggaacacaagctatctttccatttgtttgtgttttcaattttcttcataaatattgtataattttcagtgtacagatcattcacctccttggttattttttccccaagtatttcattctttttaatgacattcaaaatgagatttttttgggaatttctttatcagataatttgactcagaaacacaactgagtcttgtatttttagtgtgtaatctgtgaatataccaaatttttttttactttaggatttaccaaatttgttttttacttttttgtttttcttccccaagacaagatctcactccttctgccctggctagactgcagtggtgcaatcatagctcactgaagtcatgactttccacactcaggtgatcttcctgccttagtcttctgagaagctgggactacaggtgtgtgccagcatatctggctaacttttcatatttttagtaaagacagggtctcaccatgttgcccgggatgctcttgaactcctgggctcaagtgatccacccacttcaacctcccaaagtgctgagattataggagtgagccaccgtacgtgccctatttttctaagatgcgtgtgtgtttgtgtgtgtgtgtgtttatgtgtgtgtggacactgtaggttcttttctaagactgtaacatctgaaaacataaaattttacttcttactttccaatttgagtgccttttattcttttactttcctaattgatctggctaggactttcagtactatattaagtacgtttggcacgagtaggcaacttgtcttgttcttaaatttaaagagaaatgctttcagcttttcatcattatgtacattagttatgggcttgtcatatatgacctttattatgttgaagtatattccttcaacacataatttgttgagagcttttatcaggaaaataggttaaattttgtcaaatgcttttttgtgcatctattgagatgatcctataaatatcatattttgttagtggggtatatccaatttattgatttgcgtatgttaaaacaaccttgcatcccagcgataaatctcacctgactgtggtgtatgatccctttaatgtgctattgaattcattttgctagtgttttgttgagaatttttgcatctattttgattacagacattggcctgtacatttcttttattgtaatgtaatctagatatgacatgagggtactgctggcctcataaaataagtttgaaaatgtttcctcttcttcaggtttccgaaagagtttgaaaagcgttggtttagtgtttctttaaatgttcgataaaatttagtagtgaaggtatctatttatgggttttctttgaaagaaggttgaacactgacacatttcccttatttgtattgaccctttgagattttctgtttatttacgattcatcttggtaggttatccacattttgcgtatataatttttacagtattgtatttatatttctgtaatacctgttgtagtatcacctctttcatttctaattttgagtcttctcttttctacttagcataagagtttatcatttttgtctatcctttcataaaatttcagtatttttcatttttctttaaattgtctttctagcctctatttaatttattatctaacttgtattattttctttcttctattaactttgagcttggtttgttcttttcctagttcagtgaggtgtaaagttaggttgcttatataaaatactttttatttttttcatgtaggccatcatttctgtaaacttccctcttagaaccacttttgcttcatctattttggtgtgcttggtttccattttcatttatttccatctatttttggatttcccttttgatttcttccttcccccattagttgttcaggcgtatgttgcttaattttcacatatttgtaaactaattttcctcctctccctgattttagtttcataatataagagtcaggaaagttaccaaatatgagtgcaatcttctttgatttgttaagagttgttttatggcctaacatatgatctatcctggagagagttttgtgcaaagcttagaaaaatgtatatgctgctgctgtggtctggaaggttctgcatgtgtctgttaggtccatctggtccatactgttggccaagtacattgctttcttattgatttgatgtctggatgacatgtctattttggaaagcagtgcattaaagttccatactgttaatatattgttttctattttccctccagttctgttaatatttgctatatatgtaggtgctacaatgttgggtgcatatataattttatatagttttcatgaattgacccctttatcattatattatgacattctttctttcatgtttccgtttttgcctaatgtctattttgtattataaaaatatagacaaccctactctcttctttttaaccacttgcataaaaatatccttttctatctctttactttcaacctatgtgtgctcttaaaaacatagtgagttccttttaaaaagcatatagttggatcttatttatgtcaattcagtcactctgtctttggattaaaaaaaaattaagtaacttacacataaagtaattattaataggtaagaacttactactgccatgttattaaacttcttggactgtttcatcattaatatattctgttctgtttctcgtcacattttctttcataatttgataatttttgtattcataggctttgattcttttctatttattttttgtatacctactagagtttttgatttttgttcatggttacaagtaggattaaataaaacatcttctggttaaagcagtctattttgtggctgataaaaatgtaaatttggtcacataaaaataacttttaattgtgcttttcatccaaatctgtattttatgttgttgatattactatctacatcttttttatattttgtatttattaaccaattattgtaggtatggttatttttagtacatttgtctgtacttttaaaactttttaattgatgaatataaaattctatatattcatggtgtacaacatggccttcagatattgggatatgtggaggaaaagttaaatattaaatttcaactcaactgaacatgaacacaaataatggtcaacaaataccgaaacagattgtgtgagccccttgaggtgttcatccagggctgtttcagagaaatctctatttccatctattcttatatgttagttattgaaaaacaacagacaattgcaaaaacaagttgacccttttgtgttcctggagcccagttgcgaagggcccttgtgactgggactcatgccaaacaactcattaaaagagagctagggtcccagaccacgccgaagcttcatgagacctctcctcatcagtgcactaatgagtggctgactctggagctcaggctattgtttccttgtctggtggtgaatcttccagagtctggtgagtggagtgtctgactctggagcccaggctgtcccttccccatttggggagtttatgtatgtatatatacacatacatccacatacgtatatttttttcgcttgtccccttcccattgcaatttccttattatatcatttgcttattttgtcaatttgattatattaatttgcttattggatcatttgcttattatatctgcattgccatttatgtgggacatgtttacccttaaaggtattgtgtgtgtgtcttttattctcaccttgcgcatttcccacacagaacaggatacactgtgaaataattaaatgaagctaattaacatactcatcacctcatatactcaccatttttgtggttcagtaattttaactctactctcttagaaattttcaaatatataatacattctttttatctgtagtcaccatgctgtacaataaatctctagttcttatgcttcctgtctcactgaaactttataccctttgacaaacatctcctcattttcaccttttcaccaagctcatagttaccactgttctactccctgcgtctgagtttcaattttttacattccatagataagtgaaatcatgcagtatttgtctttctttgcttgtagctatttttaaaatatattgtcctttaaatttcataaaagagttagatttttcaccattattacagtattagaatattctgaatttgactatacacttacctttacaggtaagttttgtgctttcttgctgctaataagtgtcctttcatttcaatttgaaggactccctttagcgtttcttgcagggtatatctggtggtgatgaaatttctcagctcttgttgatgcgggaaaatctgtatctctccatttatgaaggacagtttctctgagtatagcattcttcgttggcagctctttactttcataactttggatatatcgatccattttttcctggtcttcagaaagatgctgatgttcttgtagggataccttatatgttgtaaactgctttcctcttgatgctttcaatattccttcttgtctatgacttttgacagtttaaagtgtctcaatgagaatcactaaaagctcaagctgcatttaattcattgggcttcatatacctagacattcatttccctctccagatttggaaagcttttgtcattattcctctaagaaatttatctttctctgtttcttctgagacttctatgatacatatattgattcacttgatggtttcccagaagctcggtggacttgcttcatttttgaaaattgtgtatcagttttgtccctgtgactggataattttaaatgatctgtcttatatttcactaattctattttctgattggttgagtctgctgtttaaacacttctttaattttttcagtgtaatcattgttctctttagctccagattttctttgtttcatatttataatgttcacctctttgttgaactactcattttgttcatatcttgtttttctggtactcttcaactctctattcgtgttatcctgtaagtcactgaagttaagatgataattttaatttttttgtcaggcggttcaaaaattctcatttctttagggtttggtactggtgctttgttttgctattttggtaccattatatttcctttatttttttctctcttccttgaagttctgcattgctttcttagcatttgaagcagtatttctttagtccttgctgactggtaagagaaagactttaaatagttatcctgcctagagatactgtgggtctctgcatctgttctatggctatgcctgccccacttctcttattctttcttaccagtcagtaaagagagcctgaggcagagccacccagctaatccacttcccaaatcctgacccatagaaattatgagaaaagaaatgtgtgtgttttcaatttgctacattttgggctattttgctttacagcgacctataagtaatgcatttggggaatgtgcttcagcgattgctacaataacccaagaggtgaagcatcagagtaaagtacttgtgcatttatatattatatgctatcctattttaattagaaatattcaaatgacaatttaatattaagtgtactttaaaatataaaagcatgatgaaagaaataatatttaaattatacagttaaacctgaaatacagttcaaaagataacgttcataatgctgggtggtaagacactgatgcggtttggctgggtccccactcaaaacttccagaattcccaggtgttgtgagagggacccacggtgaggtaactgaatcgtggagaccagtctttcccctactattctcgcaacagtgaataagtctcatgagatctgatgggcttatcagaggtttccacttttgcctcctcctcatttttctcttgccaccaccacgtaagaagtgcctgttacctcccgccatgattctgaggcctccccagccatgtggaactgtaagtcccattgaacctctttttattcccagttttgggtatgtctttatcagcagcattaaaaccaactaatacgggcagtgaaagatatttggggacctttattaatttattttattcaagttttattttttaaatatatactatctgcataacaaaatgtagaaggtacagcagccaagcagtaaaggcttttccttatacctttaacctcagtcacccaatttaccctatgaaactaattgtctatttgtctatacacacacacacacacacacacacacacaaacaccatatacacacacacacacacacacaaacaccatacacacacacacacacacacacacacacacacacacacacacacacacacttgtggtgtgtataggtgggggtttatgtatactttctaagtcatatttttcccagacatgattttaagtactaataacgtatgttgatttatttcctcttttatgtgttaatggtaaaatcacaatccatgtcctctctaaccaatactccccttgtgccatgtatttctccttataacttttcaatctattacacactatttattttatcttatcttattttatgttttttcaccagaaacaggagggcagtaagattttttctgtcttttgttgagatattaccagtagctaatatagagtctgttataaatatttgttgaatgagtgaatacatgtgttgcatttcattagtattttaatactaaattctttattatttttcacttacaaaaagcaaataattgtttcttttttgatttaatttttgatgattattctaacatttatttctggttaattttatcagttgtttaaaatatgattttatgaaaagcatattattagaaacaattaattgacctatacttttatgtgaaacacatttgaaaacgcaattaaattcaagttaaattgacacctttttttttttttttttttttttatggagtcccgctctgtagccagggtggaatgcagtgtcgtgatctcagctcactgcaacctctgcctcccgggttcaagcaattcccctgcctcagactcccaagtagctgggattacaggcatgtgccacgacacccagctaagttttgtatttttagtagagaaagggtttcaccatgttggccaggatggtctcaaactcctgacatcgtgatccacccacctcggcctcccaaagtgctaggattacaggcgtgagccaccgtgcccggccaaattggcatctttaaaagtactttttgtgctttatgtttttataagaggtaatttagtatttattgtaattatctttaggtattattatcgtttttaactgagaataatataaattattataaataaaagatagggttgtcataaagttttgaagctataatttattagagatattatatctaacagcttctaataaataaatgctaaccttctttatattattccaacaattacaaataaatatatagcagacataagctaataattattaaggtgccagacagcatgaaaattattctgactttataagaactttatgagtattcaatggaaaaaggaaaggtatcactgtataacagaaaacaatacagccagacacagtggctcctacctgtggtcccaacactttgtggtgccgaggcaggtggatcacaaggtcaggagtttgggaccaccctggccaacatggtgagaccccatctctactaaaaatacaaaaattagccagccgtggtggtgcatcactgtaatcccagctactagagaggctgaggcaggagaatcgcttgaaactggaaggcggaggttgcagtgagccgacatcacgccactgaactccacactcggcgaaagagtgaaacaagtgaaacttcatctcaaaatagaaaagaaaagaaaacaattaatattttctttacctttgttaagcagaaaaaaaagaagatgctaatttgattgcgtataagcagaacactaagaaaaataccaaatctaccaaatattttagttttaaatttaaaaatatgtctctcagtgatgtttggcagatacttttttataaaatagtttcataaacattcttaatatgagagtcgaaggttacctaaaaaatcattttacatcaaattctttgttttgttagattatctgttaatttcttaagttcatttaacataatttttatattgaagaatatgatggttttaaaatattatcttttctaattgatgaacaattatagcatcaatttttttcttaaatttccccactttattcaaggaggcctgagtttatgaaagtataaaggacatacaaaggtaaataaactatctatagatttaattgcctgttggacatttacatttcaatgaagcagctcagaaaagaacatgagaatgatgttaatgtaataatactgaaaggaaaatagaaatagtaggtataattaatacagcctcataattacatatgctgtgatataaatgttacattgattattcaacttcttgaatgtatttttcttttaattgccaggactgagtggtaaacaaatgatatattgccctttttaaagtgcataaaaaaatgtgtaggtagcagtgaaatatcagcacaagcaatgagtcctaacttttcaaaaaccagtaactgctgaattaattcaatctttttgtagaaataaaaatgcagttaagtggaacagggggcactgcccagctgcattcacaggtttcacggccgtttgtaggcttcggtactgtactaagttcagatctacaagtagttccatccaccaatataatagatgatgtcataagaaggagaaggaagtaataagagtatacatgacaataaaaatggtttaaagaaggtatagatttttttttaaattgctcctgctctttggatctatgctatttcttaatatacgtgaatacttttgaacccattctgaaatcaaaggtggtccagatcccacccaccccgcccacccccgggccagttctatgcattcccagcgattccacctaccccaggtcatgctgtcactatacaagggtaggagaaatgtcatggagctttccactgttgcttatcagtgatctttcttttcgtatacctggaattattttatcaacctgcaataaaatgaatgctgtggttttgtgtgctaaaacaattggttgtcattgtataagaaatcttaccgatttttggtttccctgtaactctcagggccatcagcattgccatctactaattgcagaaaattaaaagcacagagaataaagaaagacttggagtgaggagagatgaaactctgcacataagcaagatgctttctactgccccctctggaaggatacacttaacaagagtgcaaggctgaggaaagctcttgcctctgcacatggtttctcttacataaaggaggtgtttgtccatatacacatatggacaggatgattttccccctacattccctcaatgagaaactcaatgctgaaattaaaaactcatcttccaggtacaaactgcatacataatttttaatactagacattatttgaaaaagttcgtgaatgttcacagccaagggtgacaatgtaatttcaaccttccccacatgagaagtgggtccaaaagctggaggggacagaacaaatcagctacaggtgctgtctctgaaggactctgcaatctgcatattgaaattcaaagtcaacgtccattggcaggaactgggttgtctgtctattctgatggaatgatttcatgttataagataaaaaataaatgtggctgcattattttgtctttaaaaggaagagtatattgtttcaaaacatatttgtatgaataaaaatactattttttttttttgagatggagtttcactctgtctcccaggctggagtgcattggcacaatctcggctcactgcaacctcagcctcctggatacaagcaattctcctgtctcagcctcctgagtagctgggactacaggcacatgccaccatgcctggctaatttttgtgtttttagtagagacgcggtttcaccatattggtcccgctcatctccaacccctgacctcaggtgatctacctgcctcagcctcccaaagcgctgggattacaggcctcatgtgagacactgtgcacagcctatatgattaaatttttaaaaactattttattgttaatgcaaggttttcttcttacactggtttatataaagatgtctctgagagggggtatgtgttacctaggcatgtttttcttccttggaagattatctttatttggtactgggaaaacctacaaaagcagtaccctaccattgtaaataagctctattccagtgagaacatcagttatacttgccgtatctattagatgatgattctatacgtgacaagtaaagtagaggtccttcttcaaagactttcctccccatctaattaggaataaatagtaacttctcttagaagcaaactttattcaaagacctgtgctaacactcttaaatatctgccagccataataaagaaatcaatgtattttatgttcttagctcacacaacttagccctggcatgcttatactggtccaagcaagcattaggtcaaagcctgttcttcttccttatttgaaggtctttttacctttctcaccattccacaagttacttcctccttcctttgttctcctctgcctttgcctcttttcaaaagttctaagttgctagccaatcgggacaaatacagaatctgaggtcccgttccagccaaaggaaacgggacacagcagtagggtggccgtgtcaggttataagtgaccctgtctcctttgttcggtgtactgtcatggcaaaactgctggcaagtgtaccctttctgcagaaaggaaaaaaatggccttgtgaggaaattaaatttatgttcaagtgctacttctttacggcaccagggaacaagcatttctaacatgtacaagggtcaagatttcttataaatttgcacttaaaacaaaataaagtaatagatatcttaatagttaacttacattttagtctagttttaaaacctaacaaatgtcacagaaaaataatttacaatggttcaattgttgctaggattcttaaaaacctaaaatacatcagcaaaaacgccctgtggaatatcatcttatttaaaggtgttaactagccatagtgctaatttccacagggaaaatcttaactgcggtatgatcgctgagataaagttttaaaaatgtgacatctttctttacatatatcattaaagcctaggccgatattgcagggtaaccatagataatttcagctaaacatcgtctgcatcttttaaagcatcttcccctcatatccatttaggaagacactaaataaatgaggttcggagaatgataatacattttgttagtttctcagaacgctctgcattttgaattgttaataaatggtattgtgaaattttcaaataaaatatttaagaactagaagtcagcagaaaagggccactctctctccctccctcatttctcaggcttctatttgaatgtcacattcattcttttacccattctgggtattgtggaaaaaaaaatctttcaatccatggcttttaaacctcctgacaattcatcagattggagcatttttaaaaggcataaaagctcatactttctccaatttcattgaattacagtaaatttgtttaacaaacttcttgtggagggaggtcaggcagcagtcagtgccatgaattgcctcaaatcattgcgccaagagttagagacagagaaaagtgcctcaggatgtcttttcaccttgtatagttctaaaaaacaaacaaacaaacaacaaaaggactatagtttagaagaaggacagcattacaaggctttaatctcaatccacaccagaggaaacaaggtgagcaaggagcacctaagaccccactaaggaatattaagtgggcaatgggacttcctattcaagcagaggactgggctatctttaaggcagagttgcaaagggagaagtgattttggttgtcagacattgtaggaaaagaaacagaaaaaaaaaaaagatcacagaacccaattgtagctgtagaatctaaaaaggactttttaaaaaattaaaatagtattgatttagatgtagaaatgggggaaaggagaaaacaataattttgtgacttcagttctaatttcatcagagagtaggattcaatataaacatatctattggaatgacacacatccagaataacattcttgaaagtagatgattttatggcttatatattgaggacagtgctggaatgaaactcagatattcctaactgtagacactgtttcatcgatactttggtcccatatcatgttactgaaaagggtcaaacttaagagcaggaaaatcgacgaaagtaatagttggttgagaattctcaagaagttttgttgctcagttaaacatgtgctcatggtctttaaactttccccatttattctgcgactagaggaatgaatataggcacttgggtgttttgctatgcctgcaacatatgccatctgcattgacatttctcatggtatttcactctcataacccagcctcagcacggtaataagaccttgatatgtaggaccttgatgctaagtctagggaaagcagcagatgttagccttattaaatcaatcaagccccacaattaaagttcaatgcattgcagtctaattagtactgtggctagttaaaaatccacaaacagtatcatatttcaccaaacatttatattgacattttgcatgttattagggaattctcaaaaagccggtccaataaactcataagatcgtaattcattgtggtggactctaatgttaattgattagaaaaaatagtgtaatgggataaaccactaataaccataaaggttaatgaagctgagttttcatttcaattggagataaaaagttactaatatatttctcttttttatgctattgttattagatttcactattgtgtaaagttaaatgtttttgaattttctattccaatagcaacacacttctatttagtaaagtaactaaatcttttttaaaagtgtatgtgaatttttaaattttttgctttctaatatcctgaaaaactttttaaatgtttaacattatagaacaagtgaaatgtatgataaaaaaaaaaaactgcttgtggcaaattatctcattaaaaaaaaacaaaagaaacaacattattttcctctttatatatctggtttatatattttgatttttaccaatgtaatacatttatctaaagtccacctccgtggtaatacctagtgaatctccattttttccaaaacaatttcttgttaagtagaaaaggagaagaaacaagatttagagtacgtgttaaattgactaatctaaaatattttgctttattcactttaaaatatatttatttgttaactgaagctttcattaaattacttgaaccattaagctgtttttggcgacatttcagtttagtactaactgaaataaataaatgagtctatcaggacttgtatgtatgacagataaaacatagactaagcatttcccgcctacatcttcactcccacccactcaacccctttcagccatggtcttctttaacagagaagaccacagtctgcaggcctttgagaagaaagagatgagagtcctggcaaaacaggatacattgagaaaatataggagtgtgtagaactgttaagatttgcttctggtaagatactgttagtctctatattgaagagatttcagaaaaacagttattattttacaaaatgtttcgcatgcaatttgtgctccttttgtatgcaaaattacgttcaaaaatcctaaaggagaaatgaggtgagatttatttaggttttatatattttcctgctatatttatttttataattcagatcttgcacttaaaaccaattagtccaacatggacatactgctgtgctctgaactatttttttcacatttaacaaagctttatttactttctctaggccacctagtaaatatgggtgaaaaatgcgatgaaaaaccagccagggacctaggcagggaccacacagtcgggctagtgaagtggcaaacccatggcaaatattcgcctaaggcctgaatccacaatgagtaggaagccactctgctctacactgagtatcagtgacaccatggccactatttcttttctaaggaatgtttttgaaaactaaaattaaatgattacccacttcacaaaaaagatgagctcatattttacagaaataactgaatagaatctcggctaaaccatgatcttaatttcattacactcctacctaatcaatgatgaaaactgatgaacttgctcagaataatcattccgctgttcttcatcaatttaatctgaaccaaagtgcctactatgtataaatgaaaatttcaaaaatagttaacacgtacaaaaagaggagaaaaatacatatttagtcttgcactgattttttcatcttgtattcattgaaatcagtaatgaacaccggtagtaattgttaaaaattgttctcataattttcaaagtaaatgaatgtctttttttctgaagtatttttaataattgaaggaaaggtaatgaggccagacctaaacaagtgctgcctttatcactaactaagggttaaacaattggtatatttggccaggcgcggtggctgatgcctgtaatctcagcactttggcaggccaaggaggtagatcacctcaggtcaggagttcgagaccagcctggccaacatgatgaaaccctgtctctactaaacatgcaaaaatttagccgggcatggtggtgcactcccagctactcgggaggctgaagcaggagaatcacttgaacctgggaagcagaggttacagtgagccaaaatcacgccactgcactccagcctgggcaacagagcaagactctgtctcaataaataaattaattaaataaaataaaaacaattggtatatctgtttgagttttccaagaagaacattataagtacgggagtagagggcatataaaagtaatatttacaaaaaactaaccaggcacccagatctaaactctgtaatacacataatcaagtgcatggagtatctgaactccaaagctagtctcgtttcttttgcattgcactggcttcataactacaatatgcttacatctaatacttaaaacaacatgccttctcacacattttctctgtatgtcagaagtaagatttttaagaagcaagaatatggccacgactcgtctccaagaaagttcttactaataacaaagctccaacagaacaaatggaaatcgttcttaaaatgtagaagaacagaatcattatatgaaagaattttcatagatactgtatttgatacactccatatcagcatgaaacacttatatatattagtgatacttggttgtttcacttaagaaattgtcatacacaggcatacctaatctctttggactttgctctattgcattttgcaaataactgggtttttgaaaaattgaagtttcctggcaacccgacattaaacaggtctattggtgtcattattccaattgcatctactcgtttttggtgtctgtgccacattttggtaactttcataataacccaggcttctaggtatatgattgtacttgctatggtgatctgtcatcagtaatttttgttgtaactattgtaattgtttgggggccccatatgtgtccatataagtggtaaaattagtcaataaatgtgtgtgttctgactgctccactgactggcctggtcactcccacatctctctacctccttcattgggcctcgctattccgtgagacacagcaataatcaaattaggccaattaataagcctacagtggcctttatgtgctcaagtgaaaggaagagtcacatgtctctatcactttaaatcaaaagctagaaatcattggccttagtgagaaaagtatacttaaagatgagacaggctgaaaactaagcctcctgcactaaacagtgagccaagctgtgaatgcaaaggaaaagttcttgaaatatagtaaaagtgctatttcagtgaatgcaaatgataagaaaggaaaacagccttattgctgatatggagaaagtttagagtgtcctgggtaaaagaccaaagcagccgcaaaattttcttaagccaaagcctaactctctgaaggtagagagaagtaaggaagctgcagaagataaatttgaagataccagatgtcagttcatagggtttaagaaaaaaaaaaaaaagccatctgcgtaacataaaagggcaaggtaaagcagcaagtgatgatggaaagctacagcaagttatccagaagatctagctaagatcagtgacgaaggtggctacactaaaaggcagatattgagtgtaaacaaagcagccttgtattagaagacgataccatctaggattttcatagctagagaaaagaagtcaatgactagctttaaagcttcagaagacaggctgactctcttcttaggggctaatgcaactcaggattttaagttgaagccagtgctcatctaccattacaaaaatcccaggatccttaagaattctgctaaatcaactatgctccatcaatggaacaacaaagccgggaagatagcacatctctttatagcatggtttactgaatattttaaggccactgttgagacgtactgctcagaaaaagattcctttctaaatattgctgctctttaacaatgtacctggtcacacaagagctctgacagagatctactaggagattaatgttttcatgcttgttaacacaacatccattctgcagcccaagaaacacgaaaaacttttgactttcaattattgttatttaagaaatatgtttcataaggctattgctgcatggagagtgagtccattgatggatctagctagacaaggtaaaacaaaaccctttggaaagaattccccattccaatgatattaagaatgtttgtgattcatgggaagaggtcaaaataccagcacgaacaggagtttaaaagaagttgatttcaatcctcgtgaatgactttgttgggttaaaggtttcagtggaggaagtaacttcagacatgttgaaaacagcaagagaaacagaattagaagtagaactgaattgctgcactgtcataagatcttaatggacgaggagctgcttcttatggatgagcaaagaaagtggtttctttagatgaaatctactcctggtgaagatgctgtgaacattgttgaaatgacaacaaaagattgtgattatttcataaactcagttaataaagcagcagcagggttagagaagactgactgaattttgaaagaatttctcctgtaggtataatgcttcttaaccagcaacacatgctatatagaaatatttcattaaaggaggaatcaactgacgtggtaaactttactgttgtcttattttaagaaattgcaagtcacctcaattctcagcaactaccaccctgatcactgatcatccatcaacattgacgaaagaccttccaccagcaaaaagatgatgagtcattgaaggtttagatgattgtacatgtttttaaaaacataatactattgcacactcaacagaatgcagtgtcatgtaaatataactttaatatgcactggggaacccacaatatcatgtcacttgctttcttgcagtcatctgaagccaaacttgcaatatctctgaagtacggctgcatatcaataactacagacatcttatcagacattatagtttccacattagtacaccaggtacgatattactgattaagatgtaatatatttttctgtcatgagagcctcacatagaatgttacttcaattactgcttacacaggaaattttatgatttaaagtttataattaaattcaaatattactcgaattactgcatacacaagaaactttatgatttaaagagttataaaactttattaaacctcagttctaatgtttagttacatactaacttacggtgaccatattaagttatatcacatgaatttcaaaataactaactataaaacccagcatctaacataaaataaaaatgctttcctaattgacttccaacaatattctggggattacacaggatcgtgtagtagaaattttgaaagtgtgaagcatataaaatgttagatgtaaataaatattttattaatttctggtaattgtgtcaataaaagttgggcattgacattgcctgtcatttttgggtaacatccagtcactgatgaagccatgtgtaaaatgctttactgtttaaaaaaaattaaatctacagagcacaagggaaaaaactgcatgctggagttccttaaataatttgtgttttggaagaaaaaagcatataatacaacataaagtaatagagtcaaaactgaatatgctgaatgcaatcggtggtaggctagttttgatttgggcttcaaaagaatagtagagcttaatgtctttgtgcagtggatctgtggtggggataagtaaattgagtacagaggatggggagaaggtttcctcggcaacaatggacagactctgttgggggatgatttgagaggaccgatgctaccaatgcatctctttttttcaggcatttcttggaaatcatgctgtagaccccgaataagggctaggctgccccagcaggtcactgcaagtctctttgaagtctgcttctgttaattactttgaatggcaggagttgactctacaacaattatagacccaaacataagttgttttcctcatctcagcaatctatgtcaagtgcctttgttgttaatgtgacacgtcagatgaatccaaacattttcttcagtaaaatatttagctaacatatctttattttagacaaagtaaaccttttcagaaggcaagtgaatcattaagtgtgacaactgtatatctatatgctcaatactctatcattctcaaacacagtaacattttattagttcttaaaaataatattcataggcagggagtatgagagtgtggaatggggtggggtagaatattacatgtatagtgaaatggatttttattccatcatagtaattattgagccaacagtctgacagaataaataaatctcctaagatgcataaattgttgagagtttattgaattacagaaaaactgttcttgccctgtggagaataaaccaatctaacatagtttctgagtgacagactgtataagagaacccaacacaaaagtaattcatcacgaataaacttttaaaatccatgttttacatatgaaaaaaaatgctcaacatcattaattatcagagaaatgcaaattaaaaccgcaatgagataccaccttactcctgtaaaaatggtcctaattaaaaagtcaagaaaatataaatgttggcatggatatggtgaaaagggaacacttttacactactggtgtgtgtataaactactacaactactatgaaagacagtacggagattccttaaagaactaaaagtagaactaccatgtgattcagcaatcccagtagattcatttggtatctactcaaaggaaaagacgtcatcatatgaaaaaggcacatgcacaagcatgtttatagcagcacaattcacaactctaataacatggaagcaatgaaagtgatcatcagccaattagcagataaagaaaatgtggtatatatacaccatggagtagtagtcagccacataaaaaggaaaaaacagtgccttttgcagcaacttggatgaacctggagaccattagtctaagtgcagtcactcagaaatggaaaaacaaacgtcatatgttctcacttgtgagagctaagttatgaggatgcgaaggcataataataatataatggacattgggtattgggagaagggtaggaagcgggtgagggaatgaaagactacatattgggttcactgtaaacttctcggatgacaggtgcaccgaatctcagaaatcaccactaaagaacttacccatgtaaccaaaaaccacctgtaccccaaaaactactgaaataaaaaataaatccatgttttaaacagaaatactgaagatgtgtagatttacatataaaatataaaaacttataaatgcagatacgccttacacattttcttttataaagtaaatagtactactatacaagttattttaagcttgtcattgtgtttcaaacatgaaagatctcatgcttattatttttgaaaaagttctaccaccaaaaaacagagaagttaattttgcctacagaagaaatcagactctgaaatatctattaatgatagacattttagggtggtgaatttatatatacacttaatatttttcaaaatttgtatttcagtatgttagcaatggtggggggaaaacagtatgttattttgaaaattatattgaaaataatgacaaaaatgtttataatatgtatgttgtaaagaagtaaaacataagcacctttcaaaataattcagtatattcagtaaaatttaaattatttcctctgtgtgtgtgtgtgtgtgtgtgtgtgtgtgtgtgtgtgtatgtatgtgtacataggtttctttgtgtggatataggtattcaagaacaacaacaaaaaagaacatatacaccacaacactgccaatcaatatgtaaccttaactttcttgtttgggtttcctagatgttcccaaatttctataacatacctacattgctttttataatacaaatttcatactagcattcatttttaaagtagcttatttttcaaattgttttgttgtatacacagttctctttttattaaaatattattaagactataacaaatatcttaaaaaccacaacttaacccaagaagtttattaaaaactaatcatacgcttcttccttatgccatctcccttctccccccgagattatgtctacatttaaaatatatgtatgtatttgtccatattttacatatatgtccaaattgtcatttacttttctactgtttttattttttggaggcataatagatgtacatatttccatgctacatgtgataattcaatacattcatataatcaaattggggtaattataatatccatcaccttaaaatttatcatttatgctagaaaataaaaataactcatatgtatacagttaagaagaaataaaagcacatttcaaaataaaatattcagaatattcagtaaaatttaaattgtgctagagaacaattcaaaagttcctagcaaatgtattaattaaacatttagctgaaacctgacttgctgaattacaaattcccaaaatattattttaaccagattctctggaaacatcctatgccatttacaacttttcttctacattgtataatgaatgctgataataattttcaagtaatttttgatttctcaaaagtttaaaattgtaaatatttctgtccatcagtctataaaatttgattgattcctgaaacactaaggtcctattaaatgcatcctcaaggtatctgaataaaaggagctttgatttaaatgtgcttagttttaaagtgctctctctccgagcagtgggtttccttggatattttactacctacacatttctattaataataagcatatggtaattcatgaagataagacttaatgaaaaaaattaaactctttttcaactgcaagcccacgcagagtttgactagaatgtaatgagattttttcccagatgttatttatttattttttaactacagagctaaatcttgcctaaaacagcatggacacacacaattctttgattccaatttttcctctgttccctcatacgcaaggaaaaataaaaatatagcgcaattccttaaaccaaaagggtccccaaccctggctatgggccagtgtcagtctgtgcccttttaggaattgggccatacagcaggaggtgagcagtgggccagctagcaaatcctcctctgtatttacagcccctccccattgctggcattaccacctgcactctcctcctgtcagaccagcagtggcattagattcttataggcgcgcaaaccctattgtgaattgggcatgcaagggatctaggtttcgagctccttgtgagaatctaatgcctgatgatctgtcacgctgagatgggatcgtcacccccagatgggaccatctagttgcaggaaaacaaggtgtgggctcccactgattctacattatggtgacttgtattattttcatcatatattactgtgtaatcttaatagaaataaactgcaccataaatgtaatgcgcttgaatcatcctgaaaccaatccctcctcttccagtggaaaaattgtcttccaagaaactggtgtcaggcgccaaaatggtagaggacggctaccttaacccaagcaccttttctcaaagtgacactgctaaggcaaagcattacatttatggtacctgaaccacaccacacctggcccatttgactatttctacacagatgcctggatgagcaatttaccttcagggactataaccctcaacccaggaggacaccggtgcatgaggactgaaaatgtgctcagttcagcttcacagagagatagatgtagtttttcctctaaaggcgacattggtccggccattctacttactggttagcctcagtttatctttaaaaactgtttatgatttataggtccttttccctaatgcccttttaaatttctgtgttcttaatataacatacgctcaaaatactaatgcatgtgtgaagtctgtatttattactggttatttaaacagttactgggataagaaaaatattttggcaatacctaaccataagggcaatgattgagctatagtatcgtcccacaaattgatgtgataatgtcataaaatcaaatgaatacatcattgtgatacttttttttgtcttttaatttaaaaaatactggcacgacaacacagtgacttagatatattgtgacagtttcaccagtacgttactaaggggaggtctaaattattaagttttattttgttactcaggaaaatcctgcttttcagagaagataaatgcaataaaatctctctattaccccacattacctgggattcaacttcggaatttatgtttgtcattaaacaagctgaatgcattgttatcttatgataaataatataaaaatgactcaattgaggatgtttcctggtgttcgatttttatcaactgttttgatttaacctttgtacaatcaacattttaaataattttagttctatattttataaagtgtatgcaaagcactttatcacccttgacaactgcagaactagaagagtgaagtattcttgtagtgagtgaactcaattttgttaaaaaaaaaaaagtcagatagctaagttatattagaatgtcttataagttgtttttttttcattaaaaaaaaaaaaacagaattccagcaattgtttctgacaaaaatgatcagtcagtgggtgctgaaattagtgaacagaagtattattgaaaatggaatctgtacagagattcaaagaatctctcaaaaaatatgtattatttacaaaaagaaaaatagtgacttttcatttgaaatagctggtaaaccccatgtaaccaagagatcaaagttactatcacaattaataggacaagtcaacaggggtcccctgctataatgaactgaagacacaatgccaattctggacatttctgccaaaaaaatatgaatcacctgaatctaatcacaaagaaacagttaaataaacccaaatttagggacagcctgtaaaataattggcccttactctccaaaagtgtaaaggatatggaaggaaaaaattgccgtttcctatttagggaaacgaaagagacatggcagctaaatgcaacctgtgatgctgaattaggttctgagccagaaaacacaatggtggaatgttaggtaaaatttgaattaggtctgaaaattaggcaatgatattaaatcagagttaatatattgactttaatagttatactgtggttgtgaaagaacatgttcttgtttttgctctcaactatttcaagaaaaatatacagtgagaaagaataaagcaaatgtgataaaatattaatatttggggaatcttagtgaaggctacacagaatttttttactgtttatgcaacacttttgtaagtctgaaatggtttgaaaataaaaagttaagaaaactgtctctcaggctggtgtttttaaaaggtgtctccttcaaagagagagcaaagtagagaaatcaaacctgtcagtttgagccccggataattaacttttgcataatgccttattttttaaagaataatttttgtaccaaaataagatgtgttcctctctacgactgaatattgacaattaactgagtgggtgattcttcttcatattcaactgataaaataagcctttctagttttggttttttttccctgaaagttttgatgttgtcagatcactttaacctttagattaggcagagtttgagttttaattaccacacatatattcaaggaaatttaaattgtctacaactttaaaaatacttatcatgcaaattcccagatatgccaacatattcaccaacagagacttttcctttataactggtggattcatttttggggaatggtgggaaataaaaagatctatgttgaaaatgcctcaggacatttgtctcttgacaatatttcaaaataatgcacttttcaaaactatactctcaactcttttcttacaaatacccaaatgatctattctgtttttgcgtttcttcccccgccaatccaataattagagctagttctatgagttggccacagctctgacagttgattctgggttgtgttttctaattcatccccacaatcagtgtttctgaacgctgtctctcactttgttattcttcgacattacaaggatgacaaagatatctaataattatccatctaatgcggttcacccgcaagtcaaatgtgaaatgtcagatgtccaggacatccagagagagctctataatccctcattttataaatgtttaagacaatgtgaacaggctgaccccagataattataaaattaagcctttgtaagtgatacacaatttgaacaatgattgccaataatttgaccatgagaaagacaaaaaaaaaaaaaaaaaaacagaagctaactatttcttctggaaaattgtctttagacgtgaaaaattaatataagctgaacaatacattctccatcatgtaaattgaaataatcactagtttaataagaaattaacttatacttaaaattactatggacataatgatgtccacaaagctttcataaaggtaacaaacctgcacaatataaatgaacggcttaacttttttgggggggcatattacaaataacttcaatagtctaactgctaatcttttcaattgttttcttagttactcttcaactgtgaacttcccatatttccaaagtttattggtaatagtgaaaggcgttgattcatataacttttgagagacaagtttaaaaaaatctcttaaaagaactcacaattaatatcatcattaggcaaactaatgtactggttaactcacagtattaactaagcctgatgtattattttacttaggtgaaatgacgacagtccagatagctcatcgacatttaaagctcatttccttaccttaggttactaggggatagaaaaccaagaaatgggctggaactggagatatgaaagtagatgagaagcaatttcagacttcacacaccaacacacacatgaggtagtataaaaggtaaatattgattgtagtgaatcattattccagaaatgctgtagacataagaacgtactgactattcactcaagacgtggctccaactaagactatcatgattattattactaataacttaaatttattgaaaggttatgttccagaccgtatttaaagcactttacttaaattttgctcataacattctacgatgtaggcgctacttttacctttctttcaatactaacgtaaagtgtaatggtgatctgtggaggactttatcgcttgcaccttggaactgattccatgcacatgatctcacataatcccaatgcaccctttgaaataagattattacaaagaataaatctcagtggtttagcaactgttctaaatgacttgatcttccaagttgtatgcatcttgatattgtaatttccatattagagaacacagtaaactagtctcatctcctcagtggaagtgttatctcttctttacggaattacctcacattttcgtcaaaaaaatcattttatcacgtatgtgctggcctgtctctggattttctcgtctataccattgagcaatcccgcatcaccttggctactttagctcaatattgacatcttcaaatcgtattatgtaagtcctcccactttgttctttttaaatcatattgactattctaggcccttggcaatttcatatgaattttacaattagtgtgtcaattcctaaaaacaaacaaacaaacaaataaatgatacatccttttgggctcttgactggaattgtgttgatcctacagaccatctacagatgaataaacttacatcttgaaagccctgcatcttctcattcatggtctagtgtatctccccttttcatttttcatattttgttaggtctttagtaatttctctcagctatgttttacagtttcagcatgcagtcttgcatgtatcttcttaaatttattactaaatctgtcatattttaattctgtaaatgttataattttaaaaattttgttttgaaattgctcattgcttgtatcgatttatattgtgatctcaaaccatgcaacagtgccacctcacttgttatgtctagtaacttttgtatagatttaaaacaaaattcacagcaatcacatcatataaataaatacgttggatctcatatttctaatctctatgtctgtatttttcttgttcatggcacttgcttggtaacttcattacatgttgaatagttgtaaaagtggatattatttttgtttctgattttatgaggaattgattcagtctttcatcattaagtaagaaattagttataaaatttccatggatgccctttactgggttcaggaggtttctctcagttcctagtcagctgaaaagctgcatgataaacagatgctgaatttttatctaatgttctttccacatttattgacgtgattatgtatgcagcttttaatttccagtctgttaagattatgaattacaatgattttcaagaatgttaaaccaatctcgtattcctgaaagtgaccccagtggtcatgacgtgctatcctttttataaatcactggatcttatttcacaacatttttaaaaggttttttctgttttcgtttcatccagtttaattttttaatttttaggtaatatgtacttcatatttggaaattaaacaacactcttctacataacccacgggaaagctccttatatttggaaattaaataaaccatgggttatatagaagtgttttgtttagtttccaaatacgaggagctttcccacatattctgttatcaatttacagtttaattatgttgtgataagataatataacatagtatcaaacatttttaattgactaagcctttttttaacggcacagaatatagtttatcttagtgaatgttccatgtgcggttgaaaggactgtgtcttccgctgttcaaggggaagtgtttcatatggttcaagtaggtcacatttgttaacagggctaacaaaacctccacagccttttcaacttatgtctacctgttctattagttaaaagtcctgttaaaatctccaatggtaggctgggggtggcgtctcatgcctgtaatcccagcactttgggaggccaaggcaggtggatcacctgaagtcaggtgttcgagaccagcctggccaacatggtaaaaccccgtctctactaaaaatataaaaattatctgggcatggtggcaagtgcctttaatcccagctactccggaggatgaggcaggataactgctttaaccgagaggcttaggttgcagtcagctgagattgcaccactacactgcagcctggcaacagaccaagactccgtctaaataataacaataataataataataacaacaagtgtcgcagacatagtatgtgctatatatatttgttaaaaaataaaaacaaaaagtcatgttagtctgcatttgaagagtataaggggcttagaatttgggacagaggctttaataaatgactgaagagcactttggaagcactgatgcatacaggagagggagggagaacaagaaaaataggggaaagacgttaggttttgtgacacactttgaatgtgacccttctttggcagggaaattttctccagaagttgttttgaatagtttgtcttcttatattttctttattttatatatattatatttggttgctggacaaagatcttgactgtgaacttgctcatgataaacgatgaacgtgttttaacatcaattccacatacttactgctttccattatctaaaagtacaactttcctaaagaaataatggaaggaccaatgagttctattccaccaacttaataatgaataaaaccaacaatcaataatacagtgacttaatcagctagaaaagatgagcatttcttcaatatgactattacaatcaaaagcagttttactacccagttatcattttgaagagacatttttatttgcaaggggtatccaattttcaatgttctcattattcagaaactaacaaaaaaggagattttttttttcagaacactgactggtacaaaaagcattagtagaataactgaggatgggctactggaaaatatttatcaccagggtaagaagttgtgtatataacaattaaaatgtattaaatctgaactagaattttctaattcatgagtgtgatattactgtttttaaaagctatttttaattaataaatacaaattatacctatttatgatgtgcgatataatattttaaaatatggatgcattgtggaatggctaaattgagctaattaacatatgcattgctttacatccttatcatttctttatagtgacaacccttaaaatcttctgttagcaattttgaaaaaatacaatataatgttatcaactacagctatcatgttgtacaatggagctcttaaactttctcatcctgtctcactgaaatgttgtagcctctgaccaagatctccccaacacctcaatctcacagtccctggaaacaaccactttacttctcagactattctaactatcacatggatgaggtatatagaagctctaacaatttaaggaaaaggatacattttaagcaccaatactatataaattaaaaggttattattacactgtcaggagcaaagagagaagctagcaacattaagtgtgtctaatttggggttattttggggttcttttgtgtgggggaaactaattgaagaacatgagggtgggtggtttgtttgggagatgattttaggtacaagattgaaggggcaacgaggatgagagaaaggaggaggagaaggaggaatattataagggcacatttcctgattcatggtatgagcaatggggacttgatcccaccaggatctccaagaagcgcacaagacagccacaagcactgttgcctctaacacatggaaagctggggcaatgacctgcttccatctttcattgattgaggggatccctggggacatggcctcctcattcagccccaattcaagattgtgcctccatgggaagctccaggtgttgaggcaggacgtgaaaacacacatggagaggttcatgccagcagagcgacgtgtctccaggcttgcatgaaattacccactacatttgccagggtccacggcatttcctgtgcgtatttgctgtcacgctacagacaggactgagttgccagaaaataaaaagaaaatcttccttaaaggcaatgataataataattagacacgttacactgacctgcatttatacaccagctgacttacagaagaaaggtaaaccacaagaccctagaggccacgatccaatactgactgtgaagtttctcatcatgcagtggaagaattatgatgatgaattagtagtttgatacttaaacacaaattatcaaaataaaagaacctattctccagtttgatagtttccaagtagaaaagccatctgactctagctggtctgcataaagtttaagaacagggaaaactctccggtacagttccaatcggcctacgggtcaatgtaagtagcagaagagaggttcttctggatctccaacgcatgagtggttcagctgctaatgcacaaacataacacgcccctttacttctgcagactccgtccacttgctgccagttttctcagcatgacagagcctcaatacaagcgttccgcttgcccatagcaatattgcgtgaaatatgaaaccaccattaagtcgtggctcagcaggaacgtgtttgatctttttcttcatgatggttaaaaagttaatgtttctcctgccactttaataatgcattatggagcacaggataaaacttcttcctcaaaatgtaattggggttttcaatcttttttatctcttacctcatcgctaacaaacagtacatggtataaacatattcttcggtcataataggtttagtatattaaaatactgtgctaagtagaatattttctttaaaagattaaatttcattttatttctctttcaaagaatacttaataaaaaataaggaaaaccaatattcataataagccctgaacagacaagaagaaaaaacgattcttttcatcacataacagttacagtaaaagcataattcaactgagccccgtttctgatctacaaaagtcactttagtgagatttttaaagctgtttcaactatttgaaaataatacttgaattttatacattaatctgaaagaatatatctacatttataggcaggagatgtctcaaagttgtttgttttacaaagacagaagttttgaagcaaattcctgccatgtgagacaagacctgtataggtagtttgtggggactgcacaggcgggcacgggtctgacggtgactgaggccagagtggatttcctcctcagccctggcccacctttgtgtcttccatggcaccttctcctcgttttaagcaccagcccagtgtcctgaacggagcaggaattcaagaattcaataagtttgttaattaaatgaatgcaaaaggcatttggggcagaatgtaacttaaactctgttcattagtgggatgtagagtgctgtattttcctccgcttgtgggattccaactgcttgaataacaactggttgacctgagccccagaaattaaccatgtaaatatgatgatctatctaagtaaaatacatcgccaaagatatgaatcatcatagaaaacaacgagagaaatactactactctaggaaacagctgacaaaaatattggaagaaaggttaaaattttttaaaaattaaaaaataaacatttgcagatatttagttctaatttaaaatgagacttcatgggtattaacaacatggggggcattaaaacgtaatagatgagtagaaaatgagggtgacctgtgctgagaacaaattagtgagctggcaaagaagtgaaaaatagtaactcaaagttaacccaaaaagaaaaattaaatacataacttgcacattaaactacataagctatcctggaggaaaaaaaatcttaaataaccagtttcccagaaaaaaaaatagatatcgaatacataattatgaaagtaataataaaggaaattttccctgattacacttggaacaacttcaccatttatgtccaagatggatgaaaagatactgacctaggtaaataattgtaaaattcattagttgtttgaataaaaataaaaatctttaaatttccgacagaaagaacaaattatttaagtagtggttcacaaagtatggtcgcagaaaccttcaatgggacagagcagaaactgttcatggtgtctccgaggtgaaaagaattttcataataagaagattaagatggtatgggccttcctcactcttattctcctgagcacacagtaaatacttctagaggctacgcgaaaggtgtcgtggctataaattgcatgcagaagccaatagaataattcaaccatcttctgttgaaccaaacataaaatagatttaattctacttagtttcttcattaaaaatatgtatgttgatatgtaaagggtaattattttcataaattaattgattcacatacactttaactcagttttactttctagtactaacagatacaagccacataaacaaaacctccttcaggtttggaaaattttttaacagtataaattcacagaggcagaaaacagatcagcagtcaccaagagacagggagagaggagaatggaagaaattccttaatgggtagagctgttttcctggggtgattacagattctgaaatcaaagagatattattgttgcacagcattgtgaatacactagatgtcactgaattggacattttaaaatggcttattgtatgttatgtttatttcacttcaataaaaacaaaagaagtacttgattattaagcaatactctcattaatcaaagaaataaaagcagaaagttattttgaatgcagtgaaaataagagcaaaaaacaaatcatctctaacccaaggcaactcagcgaaagctgtattgagtgcaatttatgtcttcattaatgaaaaagaaaggaatacaaaacaaccttccagaatacactatttaaaaattagaaaaataacattatttaaaaaaatacatgagaaggtttactaaagacaaaattataatcaatgaaaagaacagaaaagaaacagtatttgtaaaggagaagaaaatcaaaagctttctctgaaaagatcaatgatcataaaccctaaaaaataccatttataaaaaaaaatcaaactggattagagattttactttgtgtagaagcactataaacattataggattaaaatcaagaaaatatataactgatataggagttaaggagaagtttttaccctggattaagagaattcaactcagaaattctctcataaaataaaagattatttagcatatattttacatagtatgtataaacattacatgccatataatgcaagttaggtgtttatatatacttagatattcatgtgtaatgagtatatagaatgtttctactcaaaaattattttgcacagagaagagaccataaacacacacagagagaggtgtatgggctgagtttgggggtttcactgggaaaagataatgacattgccctgagtggagttttacagcttcaggacttccctgggatagataattggagctattaaagtgggtcactgcgcccaagcatacgcatttcaaggtttctatgttaggtgcctcacctaagaacgctgggactgggagcctggggaagtgatggcggggaggggtgaggggtggataggcacggggactcaggagaagcttcccccacagagcccctgagctgctccacgtgacagctgagcttatccacaagccccgcaacacctcagagctatacagccatgagaggtctcattttccctgcagttcctagagagcctaatgttctgggtggtctcctgtgtgaggtgctgtgcaggccccaggactgtgctctgggccactgtctggaacggccctggcaagggtggctctgggtctcgccttaggctgggagcgcacaggagcccttccttcctctggtggtgatgcctccaggtctcagcgccacctgctcatggtgagcggggcacatgcttgggagctcctgtccccgggaccccgcctctaggaagctcgtgcaggggcctaggaacgtggccagtgggagagatcccagtttcccgaggggaatcacatatgggtctgtagaaacttcagcccttgcatcctcagaagaaggaatttgactgaggggcataaaggagaaaaagagacccaggcaagtccagagcaggagtggaagtttattttaaaagaccttagaacaggaaaggaaggtgcgcttgggagagaccagggcatgcacgcgaaggctgaagagagaaggtcaagagccatttaactgggatcctaggacttttttttcttttttgagacggagtctcgctctgctgcccaggctggagtgcagtggcggtggtgatctcagctcactgcaacctcctcctcccgggttcaggcgattctgctgcctcagcttcctgagtagctgggattacaggcacccaccaccactcccagataatttttttgtatttttagtagagacggggtttcaccgtgttgctcaggctggaacgcctgacctcgtgatccgcccaccttggcctcccaaagttttgggattacaggcgtgagccaccgcacctggccggatcccaggacttgtatagactcccctctttcccatgattcttcccttagggcaggctgcccgcatgcgcagagccctccttgcccctcagaactgagcatgcgtaatgtggcagggagttacatgcacgcagagcctccttgcccctcggaagcgagcatgcgcagtgtggcagggagttacatgcatgtgcattggagtctttcttccttattctggtggagggtacgtggaaactcatgctcctccatctttgtcctttaacacttatgcacagaaagttgtttctccctggggtctgcattcagttaacattttgatgttaataagtgtggaccatcaggaaatggcctctcctttgcactgctaatttatcattttcaaagaggcaatgcgataattatgaaccatcacctgacatttctagtgggtgcgggaaagccgtctcctgcccccctcatacctaactaccggtaacgggaagacagaagcactgactgtcctcctgtcctccaccacccgtgaccacgtgcagagcaccttgaatgcgcctctctctcctgtgagaggcccccacagatcccaccggcaatgccaaccaacatgcaaaagaggcatgcagtgtcaacaccaaacacacatccagtgtgttcttggtgaaactccatgttacgccacagaaacaaaaaccatacatccctcatcttactggttcagagattttccaaaaatgactctaagcttccatttaagacacaggtcaacaaataaaccagaatgaaaaaatgtagaaataaagtagaattttgtactgatatgtcattctctctactcatgtttgaagctgtcagccaacctctaataagtcagtagaggatttggcgtctgaaaaaatgtttacatattccataggagattggtgctacctgccctgctccattttgtagtattgaatatctcatcaataaatacctcactacttcctctttcaccgattctaaaagagtgtctcagaggatgaggaaagaggatgaatacgtggacacaaagattcttcgagaactgcctcaagtaagaaaaaaacagggtcaaatacatagaaacccagtgaattaatatcccttagaaatcaatcatatctctggttgattaactgaggggttcactttgccccctgccacactgagatctctgttcccccaggctgggtgcaatggcacgatctcggctcacttcaacctttgcctcccgggttaaagcagctgggattacaggcgcccaacaccacgcccaactaattgtttgtatttttagtagagtcagggtttcaccatattggccaggatggtctcgaactcctgacctcaggtgatctacctgcctcagcttcccaaagtggtgagattatttggcattagccaccgtgctcggccaggtttcctttctaacccttttaagttctgaccagatcctggaccaaaatctaataatcttagatgcaaaaaggttgtacaattttggggtattaaccataactaaatgtagatagcatataatgtgccaggtggtgttgttaactttttcacaaattaatacatttgacttttaaaacaatgaaaccatcacatcaaaactgttattatccccatctcaagatggggaaactgaatcagcaagatgttagtcagttgccttatagaacaattagaagtgagagagctagaatttgaagcccagaagtctaactggaggcatgtatgtttagccactatgctgttgccttgtgatagcttgagtttcataatcatccacgtacattcctaaagagattgtaggaaaaataaagaggacaggtggaaactcagtaaaaataatggctactttttatcaaatacttaatatgtatcaaatactgtgccccatgttttgcatacataatcattaaattctgataacaagactaaaatgttgttattttcatttttggataagacgactgaaaattatgagttactacccgatgtggcagaacctatatttgaaaccctactctaaggaagttcagttgggctgaacgttctttagcccaactccaaagcttagttttagcctctggaagaatcgatttaggagcttgaaggacacccagccgttacggaaggaagagagaatgttggtggctcttcctgactaggaactccttggaatgctgcaaatgtacaggtgattatctctgcattgttgcaaacactaaaggctattttcatatctaaaaagaatattactttttctatacggaaaggttggacctgtttttcttgtgggccctaaaaaatgaaacccacatggaagtagagagtgacaggcctatctcagaaggaagaaataacgtaggagacaaaaacgccgggggaggctctgtatatgtctttggaaactatttcctcacgttcctgctcctaatgccctgcctctttctccccctacttcacacccagctctgctagatccctgatgtaactgcagaactaaaacatttctcaaaatgagaagacagaaatataggagcaaagacagtctttgtgtgtaggtttcactatcgcagtggggatacatgtacttttgtgccctcagaaatatttttttagttgtttctttcattcaacaaatatttatgagtgtgttctacgtgctaggcaccaaggcaggtgttaagcataaaaatatatgtcagtctgggagcagtggctcccacctgtaaacccagcactttgggaggccaaagcaggagaagcccctgagcctaggagtattggaccatgtgggcaacatggccgcactcttctctataaaaaataaaattttaaaaaaactagctgggcatggcggggcatacttgtagtcccagctactcagaaggctgaggtggacagatggcttgatctcaggagttcggggttgcagtgaactatagtcatgccactgcactccagcctgggctattaacagagcaagaccatgtcggaaaaaaaagaagagaagaggaaaagagaaaagaaaaaggaaaagaaatgtagaaaagaaaaaagaaaagtatgaatatctattttccatgccaagaagaataatgttgttagtttcataaagctcagaggaaatgaagggataatcacaaattatgtagcccataagaggcacatttggagccgatgtggggctatcgctgtataataatctcctttgtttggctggtgatctacttctcagggcagcaaatcctgcagggtataaaatatttgaaaatatttttactttctttttgcttgcttaacgttctagattaaaccagagaagacaactaatagaatatcattctcttagttgtgcctgtatactgttcatgtgctatcttaacttttattactataatgctacttgaagaaaaagtcaacatgttaatgaagctgccaaagtcttaatgagcattctgtccttctggcaagcaaatgaaattattattttggagaaaacaaatatcttaacccagaaatccataaccaaacatgaagatagactacgtcttccatcgttttgtaatattacaatgtggttttttgtggggatgtggaaaaaaagtttcatttttttaaactctctcttttttttttttttttccaacttgctctttgaacattaacttttaagctgtttcactctctaggaaaccaaaaaggaggcagaaaaaatggtgagttcatggaagcatgtgcacgtttttgaaatatttgttttatttttaaaaatgaattataattgaaattgttcctgcttatcactaacattttagaaatgcattcttctgggtttagttctattattcatttactgaggtatcaatttactcatttatctgcttgttctttatccattcacatacccgcatttgaataatttaaatgaggtccaccacatattgtaaaatacaaattagcctataaaaacaaaatgtcaaagagggaaatggatcaggacataactgagggtcaaacatgaggcttttgtggtttaaatactatgggtgaggtcacacaaagcacccttctgtccagttcaaagaggaacgacattatggctttatctatgatacacatcaggaggatctgcagaggaaattgtgtagtaggtgaagtgtaagtagatgataatggaaaaagagaacagatattcagtgaacgtgacaattctaatatacaatcatttgtgcaactcacattttttgagccctgaccttggcttaggatctgtgagctcccggtctgggccttctcccatgcgtctccctcctccctactctgcggcggcttctccatgctcctccatacttcctactccccagcaccatgtttctcaagctcagctcttaacaacgcctctgtcacatgctttcacttttatatcgcacaccagtctttacatatttaaaagcataatttgagtataagaagttacagggcatctttttaaaaactgacttaaaaaattcttatagtttctagacagagcagggtgggacacgtgtgtaatcccagcactttaggatgccaaggcaggaggacttgaggccagaaatgtgggatcagcctgggcaacatggcaaaaaaccctgtctctactaaaaatacaaaaattagctgggtgtgatggcgccagcctgtagtaccagctactcaagaggctgaagtgggaagatcacttgaacctgggaggtggaggttgcagtgagccaagatcacgccattgcactccagactggatgactgagcgagactccgtcaagaaagaaataatcaaagaacaaaccaacgaacgaaagaaagaaaagagagacaaagagttcccatagtttttgtctcttttaatctaaaaataatttgaccaaatgctccaaatcacagcatctcacttgtaatttatgtttttgccatgctttctcttatttgacttatgtcctagtacagcaggtaagtttctttatatgatatacctgaacacagaatgttttgaaactgcagcgggaacacactcaaacttaggtatgtcttcagttttgtgattggaatagctgcaggtactctgacctgttagcaccttctggcattatacaccaagtgatgtagagaaaaactttctatattgtgaggtatataacgtgtgatctgccttcattccttttattatttagatgtatgggtattccctgaagccctgtactagccatttgatcatgtggtacttgaacatttacgaaataacaaagagtgtgttaatcacagtatgtgcgtgaagctatttcaagcctttgcaaggagccttctgggcatctcagggaatgtgtttcaggatgatcatcttattagacaacagtgctggagctaagtggaaacacaggttgttcaaaatgataatgatagaaacttacagacattttttacagcgtatcttcttgtatgttgcctttacttgtgaatttttctttcaatcatggaatctatttctaagaaaattttatttcctctcctcacattctggaaacagcaaatcctaagtgccatctaataaggaatttagcaaatgttactctgcaaacctttaaagtacattaaactttccaaatgtaattgacaccctttcctcatcacgctactacttaaaagcatggcgtgaatgtcttctatgcaccagacagaagactagatagtccctcaatgctagtgagaaatacaattttcaacacaggggcgaatattatttatgcctttaaagactgattcttataaatattgagaaaatttaaaaattagcatttaagtgtgccaattaggaaagcatttttagtcttgaggatttaattactgataaagcaaaaaagttattttaaatattgtatataacattaatggaaatattaatatgcactgattaattgattataaatcaagaagttatgataaaactttttataaagataaatttaataagatatatttctttttaaggataaatttaattcatttttataattaattgatttaaaatcaagaagtgataaaaacatatgtagaaactggaaaattacaatttattatttttactgaattaaaattaccttgcaatcgtaacattgtcataaaatgacacacttttatacctaatgtttatacaaagctcatatcacaaaagtcctctagacttagattattcctctggaataaatggataatactatcctcttaatattgtatgatttaaattcttttaaaaatatattaaattatctgaaaattataaattgtacaattcccattttaaaaaagaggaaaagataattcagaaatcaaacaaaattgaacatgaacaaactcaaaggctacaaagtctccaagaagctaataattaaaaattgcatctcttcttgcccataatagtctctgtatttcactaagttatcattttctctgcctataagcatgaaagtcattgtctcaattaaggagattttctttaccaagtaagctattgaagaaaaaaggattctgagttataagcataaaagttatataagcataaaagttatatgagcataaaagtcatcctttcaattaaggaaacatttttaaccgggtaagccactgaagaacaaggattctgattatctagactccactgtacacagtttcagtttattttccccaagtgccaaatattcccacaggtgatctttgacacagatttaaattaaaaatgacattttaaaagtctagccccatatgcgttcattattaagattttgttcttgctttgtgaagacaataggaaatctatcctaggcagaaatttccactaaaggtatctataaaaacgctttgagatcataatttactcaggcaccatttgtaacacaaaatctgttttatgtaacattcttgataataaacaaataataaataaagtgaaagcaaacttcaaaaaagaaaaagattgctgcgatactcatgggagcatttcctgcgtatgtagtaaagcccggtctttcatgatgaaggcatcagctttgataatggtgcactgggtttttaatatttcccgctagaaatgctattaaataaataaggcagcatcatgaggaagagatgtccctttagtcctaaaacagcgcatcctgccttacgacttcttgagtcattgctcaaaaacgaatgggcttgggcgctttcttcctcaaataccacatattgaaaggaaaagcaatgcagcaaaacatcacaaagttgcacaaagacatgcgtgcttgtgtcatcttatttcctcagagttcctggacatgtgagaaggtgcacggaccatcattctcagagataacttgagcttggactcagacccagccaggaccttcctcctctttctgtgtccagcccacacctgagcacctacttcatagacctgctctgctgaggtggtttgaatataccacattccagaatgggattgttttgcacctgtcaagattttcttctgttcactccagatttggtcatgatgaggttcttctgtcctggaactgccctacacattcaacttgggatttggttccagcagtgacagattatgcaggattaagatcccaagtacagtgcactagagcagagtcaggcagcacgggcgttgtcaccacgcagtcctgaattcaaggtctaccaccctcacctctcagctgggtgatgtgagagggagcatggatctccttggatgtcaccccctgtttatgacagccagcatgcaggaacccctatattaacgtaataggctaatcgcaggtaagcaaagtgtaggggtcatgatttcacacgaggagtaagcaatgaaatccatgctatgaagaggaaaggagaggatcattggctgaaaaggagagcatggacattcaattgcagttagatatggaaatcagagcagctgggtggggagtgtggtgcagaggtgcggccctttcttgcagactcttcgggttggactcaaggctggacactctcagaggctggcatctatgtttccacaatattcatatttttaaaaacattgagggcaataagtttcttttcacattttacatgttgtgataaaacagacatgatttctattattcaagctgtaaaacaactgaagcctgtttttatcattatgtctattttttccacaaaacttttcactcagtttttgtttcgttttgttttttagatggactcttgctccgtcacccaggctggagtgcggtggagcaatctcggctcactgcaacctctgcctccgaggttcaagcaattctcctgcctcaggagtagctgagattacaggtatgcacaaccacgtctggctaatttttgtgttttttagtagagacggggttttaccatgttggctaggcttgactcaaactcctgacctccagtaaccctccattctcggcctcccaaagtgctgggatcacaggcttgagccaccgcacccggcctcagtgttttgaatattgtaattgtaataattacgagtttgaggaatgcatgaaaaacaaaggttccaaatccatggctctcacccagataagccaattaaatatgttggaaagaacgtgtggtgtttacttagcaagattttcagtaatatatgacatcctatactccatggttcctaagtagcttgaaaatatctcgctggtctctttgtccaacttaaggtgaatgaatgcctcataactgaacattatgcaatagaagtacctggggtgtacattttaaaattcagaaaattttctattataaacataaaattcgtatttcaatttaaaaatattaaaatctactaagtaaacaaaaaataaagtttaaatttagtagcacatatggtatattgtttcatttttaaatactaaagctatgtgcgtatgattttgtatgtgtgtaagtgaatatacatagatttcatcgtagacaaactgcaataattttgatagcaaaacaaaagctatatgaatatcacaatagtatagtatatgtatagcaacctaagtcagacagaaacttaatattttgaaataaaatcaacatcaaatgtaaatataatcttaaaaccgcagtttaagaaatgaaggtatagatgttaactgacactcggaagaatttctaactcattgtatcccaaatttcctccctttcagaagaaaaagaagaaaaagttcgttggatttaaaggtattaagtcaaacagaatgagttgaagcatccccagaatgcacaaagaaacttcatgctttgcataaattactttcattgatagcacagcatgaggtgcttgcttgaataacttttttgtcaacagtaaaaagaacctgctttcagaaaaaaaagttttgcgtaaaattcacccaagagggtgaagaccaattttcatcttaacaagtaaacattaaaggcatttatttttttaaagactgtataaatgagagtgatttactaaattatactttttgtggctatccctcctttggggcttagagctcacaggctgctttagggagcgttccacagtcacgcggccataagtctcattgtgtcaccgtgacttatttgagcactggtacaacttaattcacatttgtttgtatcaattccaacgtataatttagcatagctcctgttttttgactgaggccttaatcagccagtggaaggagacacaggtgctggtatgcctcattttgccgcatttgtattctctttctagcctgccatactccaagctctcataggaagaaatgagcaccaccaggaaataaatacactggagaagtcttgcaggttaattctctgatccacttaaatcccaattgtaatgttttagctagttgcaaagaaatatttaaatttgctattcaagttgaggtgtctctatatttttacttttaaatggaccatagttattaaataaacgcttcaaaatccattgcaatgtacttgcgtgacacatacattgtcctgtatccttcataaaggactaatgtatccaacaattatttgctgacaatctgttaagctcacaaatgaaataatacacggttattcacttagtggggtttccacttttgaaaaagtgtgattgcatattatgcctacttttaaaaagttcaatacaattaagttcttaaatatttgtcttcattttgggggtttatcctcgtcatgtaattcttggagagtcacagcaaactctctaggccacggttttttctgtgtataaagtaggtgatagtttctacacaatgtgcttgtaaatattgagataaaatccataaagcactcgccgcagtagctgacttagtaaatggataacttcaggctattattattgtaattgtgttattaatattttaatagtttcttgctttttaacagtaagagttcataacaaaagaccaggagacaagggcggaaggaggggctgaacttgaacagagacggcaaatgctttccactcagcctttggtctcctcccttaaacagggaactcaggtctctaagcatgggtttctgaaatgctaccatgaagataatgttctttgatgcttaaataagacaatgttttgaagagtttgtgtgaacaagcgttctacaaatacattgccttagagacatggttttcgtgatggccttcggaaaaagggtagaatgtttatgcgtagaattctctgtttgagtagacgatatcacaaaaccaaagtaaagttgaaaaactatggttcggctgaaacaatagagcctgaacaactaggtcaggaaagagaggtctttcaattccaggccttagtgttaatggttatgattttttaaaatttctttttatttatttatttatttatttttgaaatggagtctcaccctgtcgcccaggctggagtgcaatggtgccatctcagctcactacaacctctgcctcccactttccggagattctcctgcctcagcctcccgagtagctgggactacaggcatgtgacaccacacctggctaatattttgtacctttagtagagatggggtttcaccatgttggccaggccggtcttgaactcttgacctcatactgtgccagccttggccttttgaagtgctaggactacaggtatgagccaccatgcccggccaatggttatgattttataagaaataagaactgtcaaggtcttttgagaaagcataatttagcgagaataaaatgttaatatgaagcatagattcaattttagaaagaagcagaagacactggtgagagaatgaatgactctagaataaaataacgaatgtccaggagtagggactacgaatgtacttcataatttagggaataggctcccatccatgctacttataatatctcagttaataggacggcaaaggagaaaatgtctaaggtaccacggtataaaatatgccagattgccagcttattggctaaatgatttccgcccatatttaatcaatattgcaaagatacttaaactgaatgcagaggggcttggacagtaactgatggagaagagggaaagaaatagcatcttgctcagtcatcattcactctcccaaatttataaacatccaagtcttgcgtcttgaaaacaattctgataaatatataatacatatatatcaggtattatatataattacctacatatattttttatagatatatgtttccatttctgttatttatttattgggagaaacaggagaatcagttcctgggagaaaattgtattcttttgtttcaggtttattttcttgccaatttcttttctgtaaacattggtttgcagtttttggcatgcactactcatattcattattttttcaattagcctgcaaggtctttgagggcaaagaccatgtgctgtgtttcatgctatctgccaccacagcgtatgccatgcctggcaggctgcaggcattcacacacacagacacacacacacacacacacacgcgcgcgcgcgcacacacactgatttataggtcttagattaaatcccaagaaataatgtattttctattttaatcaattctgtacagacactaagctctattatgctgcatacaacacactggatgtatcagattttcagtatgacttgaatgccgatgaattaaaaggctggtctttatgatcaagagataattcaaattctccattctgttttcaggagtggagggtacatcttccactgtagagtgtcaattggtgaaataatctccaaggccgttttagttgaggtaatccagatattgaaatcagacatgagcaagctattctaacaaggaaagaaagccatgattttcatagagaaacggactaattttgtctatttgcatctttctgctacttaaaatgtttatgtattccttttcactttctaacttgattctctctactgctttgctcttccccacttcagctattttcctattctgatctaattcttctgcttttttaattctctctctatactgttcttgttccctttgttccttcccttacacctgaatggaaatgatggtacggcttctccattccgaccctgaacttgtaaacatggaactgcaggctcattattctctagggaggttgtcattcaacctgtatcacctgatgctttcaaagtcctcattcaggatctttgctaaaaggaaaaaaaaaaaaacagatggaaagttgttgaaatacatgtgttgcggacttggatggagaattaaagagaactgaaataaatgaagcatgagtgagttcagcaaatatcaccagcttgacctctgtgtagagtcagacggttcacaactgatttatttttacgtgcattactcacatttcccctccattccctgcctacaattgtccttgtcaatacgtgctggggtgagcttcaaagggaaaataagggaagtgggcaagagatgagtccaacaaaggccaagaagaaagaacctaatttaatattacgtgtgaactaactaccttaatctacatatccaatttgcttgagaatatacgcttatagataaggaaagtaacttatgatgacagcatttcccttgctcgcttaagaatgtgccacaattggccgggcgcagtggctcacacgtgtaatcccagcactttgggaggccgaggtgtgcggatcacgaggtcaggagatcgagaccatcctggccaacacggtgaaaccccgtcactgcttaaaaaaaaaaaaaaaaaaaaaaattacaaaaaattagccgggagtggtggcgggcgcctgtagtcccagctcctcggcaggctgaggcaggagaatggcgtgaacccgggaggcagagcttgcagtgagccgagatcgacccactgcactccagcctgggtgacagagcgagactccgtctcaaataataataataataataataaataataaaaaacaatgtgccataatcatatttctcaatgtactttgttttccaggtataggtagtatgagtattgcctggacaatactcataggcagcatgagtattgcctggacagagggctataatctccctgatcctacaagaatccaacctgggcaccagctcagtgtggtcactgagcacggctcttcttccttcatgggttcacatggacacacactcagcaacccacacaatgcttttctctttaagaatctttttagttaagtacatcttccggattcaaaatacttaataaagcaacatactgcaaatgccattttttttcagattttcagaaggtttgaacaataaccaagagaacaggtgtatttcagatggaatattcgctaaggaagatgtctttctctacatagaacacagtctgaggctctactgtcctaaatcccgaaagctgatagtgttagtcattaagcttgctcttactacagggtctgtgtattatctaatgtgtaaatagcatttaagcagcctcaacaaccaaaatgctgaagatgggtggggatttgtaattacaatacaaaattaacagagaaaacactgatccagtataggacaagatttggctgctggttatattcgatcacacatcatcttttcttgcaagaaagattcatgtaattcagatgtaatgatttatctcaaagttttcaaggcattgaaaccgactactcttctttactaagacctaatgcagggcagggacagtggctcatacctgtactatcagcactttggaaggccgaggcaggtggatcacttgagttcaggagttcgagaccagcctggacaacatggtgcaagcacatctctactaaaaatacaaaaattagccaggcttggtggcatatgcctgtaatgttactactcgagaggctgagggaggagaattgcttgaacctgggaggcagtggttgcagtgagcctagatcgtgacactgcactccagcctgggtgacagagtgagactctgtctcgataaataaagataaaaagagtggctgtagctgcaaaagatgaggctgggtggagaaagggcttcccaggcccatgctctcgctacttgcttcctaatggaacatcacagaatgctcagaagctgaaaaacattgctccaatctctcacttatacctcctcttccatgcagcagcctggagatgggtggtcatggtcactagtgttgtttaagatcctggtctataagtttgtgttttttttcccctttcccttgtacaagttatttaacttggtgaaatctctgtaaaatgaaaataaaatccacatcagaaaataggtgacggcataattgaaatttcattccatcgtaacttgacataaaattaaataaagatttaagaaaatgctaccacatttaaaaagtgtaaaggttccttgctttgatgtcagtagtggacatggttcacacaccaaaggatgattttgacaataaaataaccatgtgtagatgccacagaggaatcatacatattaccattttaaatcactgaagaagaaatctaacctcctaccaagagaaagacggggagatttttaaatgaagtatccatctataagtgcatttctagaaagctgtcaaattagaaagcaaagctctggataatttgcaaaaacaaacaaaccaaaaaaatccctcattttatttaaacaacctctcccagcattttctgtcactcagggaagagttgtcagtcaacatttgattcagtaatttggcaataattctttctcacctttcccttcagcatactgagctaccaaactactaagtagtctatgttaggtgctgctctaaaattaaaaaccttcctttgtgagaaatcttaaaatgctcaatcatgctctaaaataatcattttatgtgacatttggcagttgaataggaacctcttgaacaagggactttcttttacaaactaaatgcatgcccagaagcacctcccaatttaatcaactaaacagaccagaacgctgtatgtccgaagcctttgaaacagtctttctaagagtagaggcacggtgatcaacacagagaatcctataccagcataagatcgcagcagctcattttgcaactccgaccaaacagtaaatctgaaacgagattgattaggagggaacaatatggattttattaccccaggacatggccatgagaaactcttgtctcttctgtaaaccagaagaaattatgagaatgttcacattcttggttttaaggactccaggaggacgattaaggaccctgaagccagatcttagtgatttgcaacggaaatgttgttaaagacccaacagaatgaatagcaaaggatctagggaaactcaagaggaatcttcatagatttgctagaaacatgaacatcaagtagcacgtggaacctctaataaaatgtatatttatatgtccatgaatgaggtgcacctctgcttaacaggtggcatggcatcttgttttttgtttttttgtttttgtttttgatggagtttcactcttgttacccaggctggagtccaggggcaccatctgtctcactgcaacctccgcctcccgggttcacgccattctcctgcctcagcctcctgagtagctgggattacaggtgactgccaccatgctccgctaattttgtatttttagtggagatgaggtttcaccatgttggccgggctggtctcgaagtcctgacctcaggtgatccccccgcctcagactcccaaagtactgggattttaggcatgagtcaccgcgcccggcctacatggaatcttaatacaaatgggggagccgatgtctgatgacatagaaccatgtgatccaacatggtgctgaaatcacacggtgttaaatattctatttacgctgcctcctggcatgatggagggaagcaacaccaaatgtcctcttcgtgttcagaggcgctgcttctgcctacagaccatgcgcacttctgcctgagtttttaatctctgcactgtgatttctattctcctcacctcctcatgggttctcctgagtttccagtggctgcagctgccggttcacatgtgttctctttctgtaatgttctgaaaatataaatgacgactgtccctattaagtttttataaaatgtttttcaatatattttttggccctctctataagctttgggattcgactaatgcaattgcaagttgacaactttaaaaaatctatgtgataaatcagaactcccgaatctatgattaaattttaaatatgaagcagtcaaagtcaatgaaaaattaaaaaattaataccataattttgtagaatatgttcagttttgacggtcacttctacttctatttcctcaagggagtctcaagacaatcctgatccgtgtggaacatgggggtactcagagggagaaaggatgcaaggatacgagcctcttccagtgagtttctcgtagaccaccaaggccgatgcattttcttaaattcagtaaaaggaattaccagtgtagagaacagaattaaatattaacttactttctctgtctgttgcatgaattatttgaaatatttagcttgcctgtgtatctactaggtttctgtttctttgttgatttttttgttgacttttttgttcttgtttgtctatttttttgagacagggtgtcattctgttgcccaggctggagtgcagtgggtgatcctggctcactgcagccttgacctcccaggctcaagtaatcctcctgcatcaacctcctaagtaatttgtaaatttttcatagagacaggggctctgtatgttgcccaggctgatcctgacttcctgggctcaagagatcctcctgcctgggacggcgaaagtgctgggatgacaggttgaacccctgtgcctggcccttctaagaccatagatgtgatttcctatcactttgttgaagaaagcagggagaaaaaaaaaagaacttcaattaaatagtattgaccttgtgttcatttttataagtactagatacataaggtaccaacacaatgttagaaatccagttttccaagattgtcactttttctcaaaatatcatttaatttttgctaaagctcttttttctttatacaaacacaagtatattagaaagtcaagtgattaacatttaatgtaactttaggtctttgtaaacagtgattccttggcttctttcattcctttctcattggaatgaatttttgcctctgtcattctttaggaatatggttctctgaataagcacgtgtgaccacatattgctcacagggcctcttatgctattcatctttataaaacggcctttatttttaatgtactactaagccatttgcttaagttagtttacatgtgatagtaagaatagtaacagattatgaccagtgttagcatggatattgcaaatagcttcttttcaacactacttgtgggagtaaacacacagcaccagctaaaagcattaaaaatgtatatattcaatgatctagcacattttaggaatctattttatgggaataattttggatattcacacatatctttgacatttacctcagaatcttataaaagagcaaacggaaaaaataaaaaccatcaaaatgtaaaaatggaaaacaacctaaatgggcaaagtaggaaatgaaggaaataaaatgaaataaaaattactcacaatacttatgtggaaaaacatttactgcttaaattttacatttatttttctcttctaacagtgtttaccaataagatcacagataagtgtgctttgataacaaatgtttgttttacagaatacctaatttttgcaagcctgctttcttgacagttggaaagttatgaaaataaaattctaacgaatccatgttttgtctgaaaacgtggaaaaactgttaccttaaatggtggtgctgcatgcagctgtgccctacatagagctgttccctggcaggtgggagtgagagctatggcttggtcatgagcctctttagggttctcccacctgccgagggatttgaatatcagttgaatgtctgcactctgcttggtgctagatagaagattttcaaaagaatatttaactttcatgtattcacctactgttgtcacctgtcacaccctactagtgaagtttatgcaaattataaaaattttttgaaaatatgttgcaatatttctgaagttgtttattttaaaaaatagcatacatcccaacaaatcattctggtataagaacaaacgtacttctacaaacaacaaaattctttcttgtcattctagaattttaaaaaagaaggaaaaaagggaaagagaaacaatttcatcattgtgatgcttcctgattgtcatctgtttactccctcaagtacctcacagtatccttggtactggcaacagaggtgtgaatgcaagacctttatcactttgcaagaacagtggctatttcattgatacactaatgcaaaccaaccagtgtttcattatttgagacacagtatctatttctcagaaaccagccctggccttttatgtgtttaatatgtagttgctgttttttaattttaagtgtttatgggtaactatggtagatgaatatattgatgggttacatgaaatgttttgatacaggaatgccatgtgaaacatgcacatcatgaaaaatgggatatccattccctcaagcatttatccattgagttgcaaacaatgcaattacactctttaagttactttaaaatgtagagtgaagttatcattgactatagtctcctcgttgtgctctgaaatggtaggtcttatttattatttctaattactttttgtacccacataataggtagttttgtgtgtgtgtgtctacatgtacagaggcactcgcacacacccccacagtttattagctgaaagatcaaagccaggaaacctttcataagagttatttttaaataatataattatcttaaataattatttttctttgatttttaaattataaatctagtattcttttttgattttttattccttttgccccttaagcactgtttgagtagttgaaagaaatggaatcaaatatacagcttttaaaagaaggaggaaattaaacatgtatttttattttcacttcgaccaggatattcataagggtatgtgcaaataatagtatatggctacttattaaaatgtattaaaacagaaaaaaagtatttatttttaaaaataaaatctttcatagtagttgtttagttgtctcaaaatatttaaatgtttgctttcagaactagtggcaatcctttttctaataacaacccttgtttttactaaacattcagtaattattagatgaaagaactgtttaaactgctttaaaaacagcgtgcagctctttttttttttacataacagaatgaaaattttatataagatgaagaacagaacaggcaaaactaaattttggtatacttacggaattctttacagttattggtaattcaatcattaattcacaattttttataaagcatctccaatgatgcaattaatgttttaccagagtaagatataaaatcaggtgttatcataatttaagaatttaaaaataacatatatttttatctactacaataaaattatcttgattacttcgaacaaatcaaaactaacacctgttaagaatccaggattttccctatgtggaatgcttgagttctttgcagtgaaaatggaatataaattttaaagtattttaaatcttatttgctaatatacatctgtacactgaagtttatttcttaacgttaaaaactagttttaataacttgaaaaccactatgcatgtttccatggaatgcaaacgagaggcatgcctcatcttacagtatgattttcattcagcatcctgttacgatgttattgttacataattgattacttggtttatgccattacttgcttcgttatttatcagtatgagagcttggggttgttgctattttattttataccttttttacacaaaatgcccttagaacagtttggatgtttgtggacatgaactgcaatataataatgttatgtttctttttatgatatgagctacagtgagcattatttttaatactagatgataaccatttacaacccttagaaaaattcaattagaaaatgcactaatacatcacagtggagtgacactgtctccatcaagtagcacagaaacttcatccacaggttgctgctgccatggcttctcccactgtcgggatgacgggcagcgctttatcagagagaagctgggcacctcgtgtggattagaaaaagggttcccatgactaaagtgcctgtaggtgcccagcagtgcttaatggtcccgattcaggaaatgtacaggagatgatggatttaaaagccatggttgacaacgacttcattacatgcaaactttaaaataaaacagaaaatgtcatgtccaagtcttcaaaagatttctctgataacttaaaaaacccatataggtttatttttattcaaatacattcttcatataaaatttttagttattgttgtccttcatttttccacaaatattatgttttcattagttgcaaatgagtgaatgtattagtttcataaaagttatttgcagtatgttttatctatcagtttttaacattaaaatcagtttttaatctatcagtttttaacatttaaaatattatgatcctgaaaagatcaatatattcaatatatactgattgaaatctgtatttgatatgttaaatttttttgggggggtcacgaacttgtaagaatctaatagagaaaatacattacctatatagtagaaattctacaccaagaatgcataacctaaggtttcaaatacgagataacttatgcttattttaaaatgacatatgtactggtttcaaaaatactttaaataccattttaaaaattatttaaaaatgtaacttcttaattatttttagctgtcaggttatacttatcatttttttctcatagagtcaatgcgtttttaattactaaaactgaaaggtaactatcatgacgttgatgaagattcctgaactttcttcaagttgctgcttcttctactagcatgagcttcatcaaggaaagcagtttccttttgtttattaattcagctgtctcccgggtctagaagtgtgactaacacataacgcttaataaatatttgttgaatagtcaaatataatatcacaagagcctgtgaaacagagtgtcttctcagcaattaagacaaagtaaaaccaggcaagatttgcataagcattaattatttcatcaatgcaaccctatgaccaccctgatcaatgtgactgacagctttcttgcgcattccctattctaagatattttacttatgaacccttttaatctccacaagaaccctatgaagtgggccccattactctcaacattttgtagagaatgaaattcttcaggctgaatgctgctcaaggtcgcatgcctgtagaatagcatctgtgacctcaaccactgcactgacctcaaccactgcactgaccagcactagcactgagatgtgtaccttgaatttgtttgcaaatgacttgttagccatttacatagtgtctagtacagatttgtcacagggcatagtacacatgtcacagaacacataggtattagtgtgcagtgggtgggggcgtgaaggtgcctgcagggaatgggtgagacgggattacaaccatcttttcttgaatttctttttccatttagatttttgcttctttcctttcatcttaatttctgcattataaaatcctcagatgaaactttcatgatgaacattttctcaatctcttgggctgaagcaatctttccatttccctgggatcacaatcagtgaacacgtgctctatttctgacactccttgctacattccacctatgataatttcccacactatgatccaaggagattgtgggttccctgaagacagatcccatttcattcctttcccaatgtcctgccatactcagcaaagcaatgtcaagtagaaggcactcaatacattttgctgaaaagagaaatttctaaaggttttgtttttgttgttgttcctgttttttccatgttctctgagttgttttggatggcattggtgcgacttaaagaaaaaaaaaattaaggaaaactcacaggtaatttgctttgacagttttggattctgctgttcagagcagcaaacatttttaatactttgtgactctggcacaaagccccatgttaaattttattttcaaagtgagtgctaagaagagcattgccactcttgagagaaatctggaaccttctcctttctgctcataagaatgtggtaaatcaccaactttctctttctgtcatagatgcctggaaatgaaatattaattttggtcttcacaattttgtgaatctgcatgtatgcttagttaatttgctcctccaggctttcattacctatttccttatatgattctgtaggttttcagcaagtcacaagaaataactaaggaaaataggctgagaataaatttaataaactcaagaatggtaactgacctccaatttcatgtcagccacatcgtgccatggagaggtcatgtgcacggctgccttttacgtgtccatctactagctcttaccatgagagcatctcatagctcttactcagatggacacttgcttgtccatctcatagcttcctcaaaaagcacgttgtactggagcaactgtgaaactcggtgtctgtgagaaagtctcatggggataacaaaacgaaaagcaagccctgccctcaagagaaacttcctctcgagtgaggaaacagcctgtctgcaggactcctgttattaccaatgaggtcactgctgtgtgctaggattcccagcgcctggcagcctccagcagaggtgacctgacatgggagcctcagtcacccctgtaaccacacaaaccccacaaaaacaactgttcccacatggctctcttttttcctttttggtaagcacatataatttttacatcttatttatcaaatattcataattcatagatttcttccactcatattttttttctattcatactcttggaacctacctaccaatacaggcattattgtaagaaatccatgaatatggggactttacttcaatacattctaccacgcagcctgaaacacacttatgtgagtttggcaaagggtttcaaaaatatagatcctcatagggtctaatgaatagattgaggcatgttgggggtaaataattggaaggaaacgtctcgtcgctgctgtctctccacctcctcgtggtgatgatgaaattactcctgcccaacccggctctacttatcactaattgagcactctgatattgatgtaaaaagacatatccccagcatacgacatcagtgcatgacggtgctcatgcttttaagggaaagcagctttcctttccggagacatcggtgatttactgaggtctcgtctcctcttgatcccttcccagcgctcccattaggtttaatgaaaggaacacaatatgggaacagtgagaagacaaggaattagcgtcctaatgtgcatttcattgccagccacaggttccactgtttttacactgcctcctagaagcttgcattttacaacaattggaaaatcagaaaaagaacaaagatgctgcacaacacctggaccacaagaagtttcctcctttccttcagatgtgcacagcgacctttgaacagtagccagtgcatttagagagctctacttcacagtgaaacatggggcctcaggccctgatcacattttacaacacctgtgagatcttagcacactaacagacagggacagccaaatctcaataatgtataggaagttttaggccaggaaatttagggcatctttttgttttgggagcggattgcaatgtgctctaatttgttctggatgtagtaacagaggtgtgaatcaggtatcacgctgttgtgatggctgttctaaggcatgagagaatgactaaggacagctggaggagacatcagcgcagctacagaggctacatggaaaagctgcaggagaaggcgttgataaatgtgcatgcaactcacaggatacagtgtgtctttggcttagaatgttgtgtcactccaaaattcatatacagaagctgtaactctccaagtcatgatattaagagctcaggcctttggaaaacacctacaggaagatgggatcatgaggatgcggccaacatgatgagattataaaaagaggaagagattccagagctctctccccgccttgtgaagacgctgaaagcaggtgccatctatgagccaggacgcaatgcgtacccagaactgaataagctggaaccttgatcctaaacttctagcctcagaactgtgagaaataagtgtgtgttatttaagccaccgtctgtggtatcttgttatgacaatacaaacccatgaagaaaatgtagagaagtgtctaaattttcagagctatttatactgtagacagtcacaaataaactttgtaaactgaaaggcatactccataaagaccctttgtcctcaataatatgaactatagcttcagccaacactgccaaagttaaatattaagaactgggttgaacaactcacagatacttcaaactgtgtattcacatggcaatggttcaattattttaaatgacagactcacacaagtaacatcttctattcctaattgattacttttgtctgttttttctagaaaataggttttatcattgtatagtgctgtacggtttatagagcattttataatatatgacacaatgttatcacttttcacaatcaaaattagctatgcctcatcttatcaaccattggcatagatgggaacttaactattaggggaaaagctgaactagcattgtatccgaccacagcccaatgctattcttgtcacactgtaatatgcgtccggaagcagttctgagataatcctgaatttcagctttaacgcggtattttaagtgttgacctattcctggcggcataaaatattcttcccacttctatggtcagggaaatcttcacatcttacacgtttgtgaagatttttttttgccaaacttcctcacaattcactctgctcgtctctgcttctatgttgtttatgccatttagatttgtcgtctctctttggttttccactcaaattcgtagtgaaaatagtttccccccttgttaatttgttttttatgccccaatgatgccttactttttgcttatggcttttctgtatcaaatgaaaatatacaagggtttctgcctattgagaatctggagaatttaaaagaacgatgtgacaagaagtaagaagcccccacccttctgaattcctgaattttcatttctgctgcaggcgacattctcacttagactggggatacataccccttggccaaccactaatgtccccactcccagcagttggctactttgaaaatcctttcaagttgggaatgaaggtggagactgtttttattttcaggctaaaattcacaattgttctaaaacatcccgccgttcccagtggttttcccataaagagtaggggccctgctcacctttccccacctttgtacccacacccagaggttcttcaaggttcaactatcctgtagtaaccatgaattttcccacagtcaaaaacgcccgtacttgtagttccttccaaggacttgctatttgcataatgcatgctgaaatgtcaggagtcctccagatggaaaacagtgatagttacgctgcatgtacaagagactccaagaatgggtatctccatagttttcttcagtaaagaacatgcaattattctaagtgaagtaactcaggcgttgaaaaccaaacatcgtatgtactcactgatatgtgggagctaagctatgaggacacaaaggcaaaagaatgataacagcggattttggggacttcaggggaagagtggaaggggggtgaaggataaaagacaacaaatatggtgcagtgtatactgcttaggtgatgggtgcaccaggatctcacaaatcaccgctaaagaacttactcatgtatccaaataccacctgtactccaataacttatagaaaaaagtaaaaaaaaaaaaaaaaaaaaaaaaagaacatacaattgtgtttacctaagtctttccacaccgtgttccatcacatcactcataatttttcctttaaattgtatcaattagagcagtattgttccctttgagttgtcttttaattatgtctcttgtcatagtttccttctttgacgttaattgtgccccaaagaaaggctcttttgtatttgatttcttcagtcctacatttaataaacgtgcttggagaccctgccgtccgacaggctgtgcgcttcacaaagtcaagagaagaggcagttagcagagcctcacttttcagtgagtcagcaggagggcgtgcacttgctgcagggagtaatgcagctttatctgtgaagtttcctgtcatacagaactagttacaattgcctgtaatcccggcactttgggaggccgaggcaggtggatcacaagttcaggagattgagaccatcctggctaacacggtgaaaccccgtctctactaaaaatacaaaaaattagcctggcgcggtgacggtcgcctgtaatcccagctacgcaggagaatggggtgaacctgggaggtggaggttgcagtgagtcgagattgcacaactgcactccagcctgggtgacacagcgaggctctatctcaaaaataataataataataataataataataatattaataaaaaaaataataataataaactagttagaattaactacaatctgagctaaaacttaagaatgctgggatttaaatcctggtctacattcctgagttgtgtgatacagcataaattacacaatccttctctgcctcaatattctcacctgcaaaatgaggataatccttgtacaaacctccatggttgttaggaaaattaaatgagctaatatatggaaagcacaataagacatggaattaatagaaagatcttaactcacatgattactattagtatatactccataaggaccagaaaaataacgcatcataaattatgtgcataccatttagaattatgtgcactaggattatgtgcactagaattatgcgcctagtcatttagaatttcactactattatgaagtactgctgagagagaaaaaaaaaaagccattaaattatgtggggcaaagatagggcagatctgagaccagggtggcggaccggaagcctcataagatcaggaggcagagggaagcacccggcatctgtaggaggcttaacgtggaaggagctgcccacagataatggacagggccagaacgagggcaagaatccgctggaggattctgaggggagcacgatggtcactttcatcattgcagctctacgcataccaaggacaaagctaaaccattagcgtttcctacccttgcctttacaataactttgaaaaatagatattgttatatgcactttgcagatgaaaaacaaaacaaacaaacaaacaaacgacaaatagggcccctagagctagttagtagcccaagacagcacagcgggataaatcatggggccgggatcccaatccaagttggctgactcttttccccaggagcctctaatgatgtaaaacgcctcagacatcgttatgcatcctcccacatctttctttctttttttttttttgagacggactctcgctctgtcacccaggctggagtgcagtggcgcgatctcagctcactgcaagctccacctcccgggttcacgccattctcctgcctcagcctcccgagtagctgggactacaggcgcccaccaccacgcccggctaattttttgtatttttagtagagatggggtttcaccgtgttggccaggatggtctccatctcctgacctcgtgatccctctttcttgccctcccaaattgctgggattacaggcgtgagccaccgcgcccggccgcagcctcccacatctaaaattacctataagtcaccagggtagatatcaagtcatgaggaaaatatacttacaggacttgggacaggaaactgcccttggatgccatttcagtgccgtggagaaggacagccccaattttgtttttgatgtttctattttattttttcataaaccccatttatcaaactgtatttttcaaaccatagcccacgtgtatcatgatagagatcatgtggagtgtattttcaggacaagttctaatcccatggattgggggccattgctaagtatggttagatgttcccctagtctggtagcatctgatggggctgtcaactgcacctctagagcacgtcgcagttctgatggggctgtcaaatgcagctccagagcacctggcagatctggccggctgtcaattgcaactctagagcacacagcagatctaatgggactgtcaattgcagttctagagcacaccgcacatctgacagggctgtcaattgcaactctagagcacattgcagatctgatggggctgtcaattgcagctctagagcacagggcagatctgatggggctgtcaattgcagctctagagcacacggcagatctgatggggctgtcaattgcagctctagagcacaccacagatctaacagggctgtcaatagcaactctagagcacacagcagatctgatggggctgtcaattgcagctctagagcacatcgcagaaaattcaggtcaggaacctctcagactgcgcttgcacccagccacctgcacagtgaagccatcctgcaaagcgagtggcaagcttaacttcaaatgtcacattgatgtccccaataaaatgtcacacatgcacagagtttactgagccaaatttcgatccactgccaaaagaaaatgctgacgacagatcatgagtctctgttttcctatttagacttttcaattctaaactggtgagtacttttggttctaagataacaaacctaaacagagaggcacattgatatatgtttctataaggtaaagcagcattaaataatgactagctcattttgaatccagcagtaataagtacactattttgatttttcgtctaggtatattaaaaaatatatatatagccaagtacaatatttggattcttcaagtaagaaaaaatacagctaggggtttcatttgaacaaaatgccaaggcttgttacttgtgttttatgaaaacagaatgatttatgggttcaggattcagtgtatatatcatatatatatatatatatatatatatatatatatatatatatatatatttgtatgtatttgtgcgtgtgtgtgtgtgtgtgggtgtaaagggagatcacacacacaaaaaactagagggaatggaagagaaaaaggagcaagaagaaagccagaaatgaagagaaagtttgaatctatgtccataaaacgaatactttatttcaagcttcattgtagttcattataagcctttaaaattaacactttagaatttggtgaagacttgggaaagatggattattccgatactgggaaaatcacggatctcataaggtggctctgaccacattttgattactgtgctcatgttcttagctttcaaaaacactgtggcttttatgttacttaggggggacttgtcatgaagaattacaccatagatcatgtacttcaggagagggtgtgatggatgccagctgagccttccttgtcccttctcacagtttgtggtaaactagaaggtatctgagaagcattgacgggttataaattgaagtcccatttcatgctttacaaatttcccacaccatgcacaaagcacatttgcagataataaattatttttaaagcaggcatatatgttttcgtttattagggttacagattgcattgttttgttttcctttcttccatagaaagtaaatgaatatacatctaccctcttgtctagtcttatgtgcacacacacacaaacacacctgggcgtgcacactcacacattttagaacataattgctgctcagaagtctccatcccaaatgtttcaagagccagatacaacgaacacatcattttactccatggattgctctactatggaataataacagtttcactttatttgaaggggcgccaccttctagtacaggaagatccttgcacggcagaaccgttgcactcacagaagcttgctaggttgatgctagaattctcattacaacctccaagaatcaagtaacaacttgattcaagaagttagattaaaaaggctgcctttaaaatgttaaagtgatttttttttttttttttgagatggagtctcaccctgtcgcccagattggacagggtgagacagcattcttcaatgctgagactgtaccctaggtctgtctgagcatcagataatttttcttcccaattcatcgtgcactcttactttgaacatttcaaaccattttgcataactcaatttttttttctaattctagcctaaaagtttccctggctgtcctctgactcccatttaagccaggccccacccactcccctgcttctctttgctatctcaaagccctgtcttttcctcttcattatatgaagaccccatccaaaaatcaaggatctcgttcgtatctgggagctacaagttcagatgaacaggatttctcaagtgacttgaaggcatcaccttaaagtctctccaaagagcccttttattttaagctgcccctcggtcctgagatggtgcaaagacaccagatggaggaagagctttataacttccctcgcctggctgagggcatcaacattctctctacaatccttccctatgtttctaaaagctcagtgaaaacccttctagggtgttcattgaaatgtagatccctgagcactgagacacccccagccaaccttcctaaccacaggccctggacatttcactgttgaatacgtttccacttcaaggtgaaatctgaaatatcagggtatagccatgtgcaaagccgagcaactgacttccctggctaccaaaagcaagatccttctcctttctttttctactcccatgatcagcagacccgtataaattataagtatcttaatctttcaactttctaattatttattttttcccaagccatgcaacatacctaaatcatgattttcctaaagtactgctttccttataccatgagatatgagggacagagtgaacattttacaagcattttaccatggaaaatttatcatgtttcagttttgctcaaaggcctgcttttacaatgtttaagtgatttttctttttttttagatggagtctcaccctgttgcccaggctggaatgcagtgatgcgatctcggctcactgcaatctctgctcccaggttcaagcaattctcctgcttcagcctcccaagtagctgggattgcaggtgcacgccaccatgcccagctaatttttgtatttttagtatacagggcgtttcaccatgcagttcaggctgttcttgaactactgacatcaaataatccacctgcctcagcctcccaaagtgctgggattacagacgtgaatcaccgcatccatccaaaatgttaaagtgatttctatcattttgtgaaaacgatgggttcctttctcccaacttactggaatgtatttacacacacagcgtctatccgagttctatgggagaaagcaatccagtatatacacttcttactttacacacaccgtgcccacaacagcagcacgcactcttcctgtgaacatgcttcccatgctcaaaggctacacacagcccagtgtttctgtaacatgttctgtgatgacctcactgagcagtgctttctttctcctccaagtaccgacagcatctttgcaactgcattgcttatttgttgtttatcacatatgccatgataacgactaatggatacaggggttgtctgtctccgttcctggtacagtggtaggtttctgacttttactttcatattcacccagctagatgagtatctttaatctcctttttaaagtcaggaaaccaaaaatctgggagtctgactctagcccaaatggtgcagctacgaaggggaggaacaccatttttaattcctcgttcttctcactctaaggccaattctgagaactgtgaaggatgagtagggctttgctgataaagcagaagagacagttcccagacagagaaaatggattgaaaacaggaaactgcaaggtggaacgaggtcactagcagcataaagtgcaaaatggaatgtaaatattgacaggactcaggccaaagcaggctctgcgccacgtcaagaagcatagccttatccaaacccatagttccagatgttaattgacagcctgccaaaaagaaatggttcagggtccaatctgtttggcacattgcaacatcttctacctgatctctgagagtcacaccgaatggtctcacatcaaaggactgagaaatccacaacaaaggaaactgctcaactttttaactcaattttcttgaaaagagctcaaaatgattttactttcaacacacagctattaatagatttggaaacactactgtgcctaaaaacatagggaagctgttgaaatattgtgatttttttatacccttttgatgtcacctcttattcatagtcatctgctgggcagttgggctggttcagaaaactaaatcagagtctctaagcagtaagaccctggtgagtctgtgaatcctaaatctgaaactcaatattgaacctcggctttctggatcatctccatcttgtcccagaaggccattataaacatcacacaggatttcaacagagacaaaagagcttgcatcaaattctgaaatagcataactactgcaatgtttttcagtttggaggaaaacctgaaattattatgaatgataattagttatggttttaggtctgtgtttgtcaaatatgtacgccactcacaaacaccctaacctctcacagctcaggctctggagcacggaacagcagcaccaaccagagctgaacgattgtcagaaacagagaatctctggactcactccagaactgctagatcacggtctgcattttgaaaagatctccagtgagtcctgtgcacatgacagctggagaggaacgtttaatagataaatatgtacttcggtcaaaattccactgttatcacatttcatttttactaagtgatatacaggatctaaaccaggatagcattttgattttcattcacaaagttgacggacatatacaaaaacagccctgaatgtgaaacaatgctgattatggtcaattatatttccaaacaacaaggaagggtcatcatttaggtcctattttttcctttaaagtgatattattactgttgttattgtcacacaattcataaccaaagtaagatcaatgttttaaaagttgagtggagaagttaacagcttttataactcaaaaaatttgaaggttatttgctgaacatagacttttagaactagatacaggtaaaaaccattgttcaaaacacattctatttcaaaaagtttttctttttcattgtagggcagaaatctgaactctctatggcactgtttcttacagcagtaaacgtgcagctagttatagaaattgctatgtggggcgggcattttgctaagggttttccaagcgtctgctcatttgctctagttagcagctctctcagggatgtggcaatcacttctattttacagacagtgatctgggacttccagagcaaacctgctctacgtcatcaagctcagaagtcataaaaccaagactacagcctaagtctcactcaaaccgaggtctgaatcagtcatcttggcttagcaactatgcttttatggcctgctgatagaaaggtaatgaaaaaacgacagaggacattgcccaacactctccaagctaggtaagagcggcttcttagcatgctggaacgagttgtggtaacacagacaaaaaacctggattctcttctagccaactaataatactccacagggtaggataaagcacatgatctatttatgatgcagttcctttttccccaaacaagaaagggattgcattaagagatttctcaggtgccatctattttaaatttataattcaaaaaaaattaaagtctttatgatgtatatgtttattaagaaacgatactgtgatactctaaagagattcgaatcagaagaacttagatacttgtatttactaaagtcataggtgggaaacgctaatgttctaggccactactcatttaaaggatgtattaagcttggatagcacgtgccaacaggaagtaacccaagcaacaaaatgtcacattttttggaggagtataggattgcacaaaattaccttattctcctaaccagtcctccatgaaattgtgcaaactttcataagaaagagaaaaattagatattcatggcttcaagagaaactctaaatgaagatatcaaaatgtacaattggaacacgaggatgtgccagttggctgatttgaggaataaatgagagttaagcagcattatttgagaatgactaaaatggagtgggcgcaatggcccctcagaaggcagagtgtttttaaatgagaaatttatttaacagcgttaatttagttttacttttttattgtttccaggattaagggccacatacaaaaagaaagaagtgtgattacaaacaacaggtatttcatagttgatgaaatacattttaatccataaaagacttcttttttcattgcctacagcttaaataatttataggaaaagtatttttcaataaaatgaggttaatttggagaaatctgacatgagagaaatattacaccagaactgtagagttcaactctgccctaagaatggtaaggatggagacggggacttctctcccgggataactatttttcctattggtcccatctttagagaccagggatgttttcttcttctctgttactcctcagtctggacaattttatggaatcttagggtaaaatactacattttatccatagctaccaccattcaataaattagaaaagtgtcccaaatttcaaatacgtattctttgaaatagttttttaactttattgaaactctggtatttacttaacccgaattaaaggattgctctagaatgctatttctagaatttgtgaagaaatctcaaattcaggcttaattctaggcaataagacagtcgatggcttctcagagttgcaggggcacctgctggtgagtccatccctttcatgaggaaggagaggggagggcaggaaataattcctagggtatacgctcctggtagtgaatcagagagtgcagctgccccttcacagagagccaccttctttgctcctggaggtccattctgacgtgaaagacccttccttcactgcctggtgaaagcatcatctctagatgatgcttttcagaaggacaggagagaaaatgtgtcttgcaaaaacacacctgacaaaaacctctaaaacacagcctgcctgcttcactccacttgtggggctgcagcatctttcccagaaattccttcgctgcccagcggcttcatccctggccacgagccgagagaaaaggtagagactggaaattggccccacagtagacattgtggagagggtgcctaatccacccaggtgaaaacaaaaatatccaggataaggcatgtgaaagaaagccaccaatcaagttagaaattatccgtacagtagaattagctggtattgaaagaagttcgcattatttgcctattgagtttcagggtggaggtacctaggttgtggcgtagtctgggatggccagttttctccacctacctaagacttcagtgcgtcacggttgcatatataaccctgtttagtcacatctttatgcgacagcttcatggtaacatcagcttgtcattcatgtgtcctcttagaagcctgataatatctatcattatgttatacccagaaatatgctcaacaagcaagtatgctaagatgattacattactgtctagtgaataatgctggaaagaaacacgtaagagtagctagtgatgactccaccacacagtaacagagatgactacaaattagaagtggagggcactttctttgtatgcactaaggcagaaggttgctgaagaaattctaggatgagagtggagtgccgacacactgcttccatcttcctgttttgaaattagcgatgaaatgtggtctcaacttttttaaaaggaggaggaaatataccttgggactgtctctcttcaagtctccacactgcctctttgctttttggatggttgaatatttaactactttgaagcctatttttctcatctataaaatgggaatagtagtatctccaagtagcagtagcaactattgtttatattttcttgttatataacaaacactcggtgattattaaatgtttttttacaaaaaaaatacactattgaaaaaacatagaaatggcattttaattaaagcaggggtttatgaatagagctacaatatcatgttaattatatccctacaccttcagctggtatgcagagtatcaagaaaaggagaaatgtgtatatatatgtgtgtgtgtgtgtatgtacatatattatatatatttttattgttagatatatataaatatatttacattcatatttatttcccatttatgctatactaaacacttctaaaaaacaacacttctaagctctatttttcatgaaccagcataacttgacccttttgcctacctggagtacgcaagtttacaaggggaactctggggtgacagttttgtaatcttattttgttcccgttaaaccagcacaagtttactattaaatcaatctaatcagtgattggctgaagttaaaacaaaaataagtgttgaggtgcatagcttacaacaggtttgtgaaataaaattactgaatccaaatttaagatagaaaatatgggactggctgttgtggctcatgcctgtaattccacactttgggaggctgagccagcagaattccttgagtccaggattttgagaccagcttgggcaacacagtacgtccgtgtgtctacaaaaaatgttttaaaaattagccagggttctgcacctgtagtcccagatacaaggaatgctaaggtggaaggatggcttcagtccaggagtttgaggctacagtgagctatgacagcaccactgtactccacactgggtgacagaaggagacccagtactaacattaaaaaattataaaggaaagcacaaaaaacaattcgcccattttaattggtggcactgcagcattgctgcgtggtctcctccatattcataaacgatgtcactgcttttccaaagccatttttctcacaaaagattgaattgttaacatgggataggtcaagttcatagaaacaaagaaagatggaaacggccacagttggacagggccaaggaggcaaaaccaaatgctctgtgggtccctggctggagccctggaccagaaaagacatcagtagaaaaggcagaggaaatcaaacagagtctgaaaatgagttagcagcactgatgctacatgaatttcttggtgccaataattacactatggttatgtaagatgttcacatgaaggaagctaggtttaggatatacagcaactctctgtgttagtgctgcaaattttctgtaaaatgaattcaaaataataacaacatgaggagggagaacatgatgcctccttcctttaattttggggcacgtgagagaaggattgatttcagggagtctgttactcagcatgttcctctataattctccctggttagaaattaaatagacaccaagtcaattatcaattaagtgacaagttgggtaaacactggaagcattaactgacccattcaagcgttctttgaaattcactcagctttccccatttctctgaagttttgttttaactttagccagtcaccaattagattgacttaatagtaaaattgtgctggtttaacaggaacaaaataaactaaggttacaaaactgtcaccccagagtttcccttgtaaacttccatacaccagataggcaaaagggtcaagttatgctggttcatgaaaaatagagcttacaccttaaaaaatcataaagtaacagatgtttcttttgaagtcataaggcagccctaatccaaagcggaagaaatgttcttgcatttattatggctgatgttttccagggagggagatcacacaacctgtttgtttcacttgcattatttatgtagtgttcttccaggtactctgcatgcccctctaagcattatgataatgggatcgacaaaagataggcagtgggcgatttccacgtggaaacgtgcagctgaacaaatgcaccagggatgaaaacgcccagtaacataaagacagggatgggttcacaggggcaaactgcaaggggatgggcgtgcctggcagggagggagccaggatggggccaaatcggtagctgtggacagcttgggaaggcacactgaggcttccaggctctgtctcagggagctgaagctcagtcatggaagttaagaatcgatgcatttatatttgttttgggacacattttcaatgcatttatttttattttctttttccttaccttctctatcctctacacattccctgtcacagaagggtatggaagcctgtttcttttgttatataagttcatattttaaagggagtaaatgctccctcagtgttcccagccaagactatacaaccttaatcccgttaaccatcatgtcttaatttagaaaccatagagggagaactcagaaatgaaatcaattttctttcttcttgatattattagaagtacaagttataggctacaccatcaaatctcttcagaaaaaaaaaaaaaaaaaaagaacacttggctagtctcaccactacacaaatccttcctaattgcaagaaaaataatgactagaccatgctataaagtgaactcaaaatggcaactctctgttaaagcaagggattgataggaagccaacctgcatgaaattagaatccgactagttaaaaaaaaaagtcagtttcaactaatgtacctatagcctatgaggcttaaattacgaacccaacgtatgtttaatataaagataattttggcacatgacatcatcccctatatttagactgcctccactgctgccatggcaaccctgacttaaaacatagctcagtgggtaatttcactccaaattaaatgaaaataaggctaatcctattattgttcctaacaattttccaagtagcttcttctgagagtgcccttgcttatatgcccttttttaaaaatagattattggaagatcatatgtgtatctgccctcactccactcacagtcactcgcaccaccctcctggctctgtggaatgaccctgtgcttgggaagaggtcgcagcacccacaatgctccccgtccctgtctatgcaattcgggaatggggaaaccttttaaatacaccaatttgattcatgaaatatttcagagactgtcactgtagaattactgtaaaataataggctttttaagataaatcatattatgcatttgtataggccttaaaagggtacttcaaattattctgttttatgttttaaatgtgctcctgtaggtttccatagttatttaggagaaccatcttttgcttttcagcctccactgaagagtcattgaaagctgagagttccacttaaacgtagtccttgtggctgtgttaagatacttcttttgactattatgataaacattaaatgttacacatacacacaaaacactctgttgacccacgacatatgctaaattgcttttccatctttaccccgacagttacctgttcaaggctttatgatccagcctgtagtcctgaaacagagaaactctacttctctgacagggcattgaagctcagacctggactacactgactgaggggctatacatagagagaagaaaatgccgtggagtcagagaccttgaacctgagctctgccaagggctccatcagctttgccatctcttgtcctctgcatatctcagttttatttttaaatctacaataataaagagacaatagtagacaatagtaagaataatgaccccacagggcttttgcgccaagcaaataggacaatataagtcatcccaagaatacaagtataaatacaactctatccccggctaatcatggctatttgaagagagcagctaagctaacaggcaacagagtttattagacatgaaggcacacaggatcatagttcccactgataactttcccaccagcttccctagcaaatacagagagagattccagtgatgtagaagatgtcttccagcctggatccaggcaccaagaagacagtggtagtctctctggctatctgtgctgatactctctatgacaaggatgatcaattgttgccataaagtgctacaatggtcccatcaacttttcagaacacgcttctcatcacactcatgatctgtattttctgacacaaactaagtttctttggcaaaagctgccactgatcataggttctagaatcactaacaaatcggcctcacttgcttctacctctctcccaacctgacatcttactagcaaggtgtgcagtcaatgcccaatacctctggactgtcctaaaaataagacctttaactttaagcatataacttctgagaatgagtccctatatattttatacttcaattattttctgaaaaccacaataattttaaaactaggaagaggtgagatcacttgaatatctttaaatgattagtagagcatatgtactaaagagatgcttaataaattcatttttaagattttttttttagcacagcctctctttttacaaatcgacttgtctgaagtcataaggatttgcttttggcagaacctgtggtataacttaggttatccacctctcggctcagcttttgcttccatgaactctaatgttagacatagcgagataggtaataatttaaacaaattcctgagtgtttaaagttaaagtcatacaacctacattaagcagattggtcctggctaatctaaaagtgttgttcagcatgaaaaaaattgaaaacaaagacaatctaggtagaatttgtttggtttcttcctccctcctatttgaaataacatttaaaacaagcacaataaaatcaaccaggaaaggacttctccatgaataggaatcatcagcattgagccttgtgatttggaaaacaaagtgcaactcaattcaattccaataatcggtttaaaacaggtgctcatatttacaatatgcttcatgtttgacatgtttgtctggtagccttcatactaaaatgcaaactgcaacctgccgacatgttcacaatcactcattccatattcccctcttcctactcataaatggccaacatttcctctgtgtctacctgagtttcaacatacccattcttgtttagtcatatttcaagatctaaaacagataactgaagcagttttaaagtgttcaggtttaaaataataaaaacaataacacaattttacatgcaacaaatgacttaattcaagatagaaattaaggccttaaacatctatgctatgtttttaagtctctcaaatggcacttatggacacaaacgatactattcttgcaatcacgaccatcactcctaaataggcggtacttcattagatcttgttttcctttgtctctactggggtacacaccagagaactgaccaccctgcggttaattttatacatatagtggactaagatgtgtgttaagttattttgcctttgaggatcttgtagccacgggcacttccccacaggtggctacagaatgtggtacacagtcttcacgaagaaaaaggaaagcacaatcatatatctgcagcagtctgtcaattctcgctaacgtgagataaaagaaaatacacaatctaaaaatctctgctcacagtgaaacagcttcagaccaaacccaaaactaactcaccttacttggttgctttaaaacagtccaaaaatgacagcactacaagttcaagcacacagatgacttcccgagctccaaacaccagcacaaagacatcttagaaactttgaaattactcacagtaaaggtaacttttccagagccaaaagagcaaggcgaaaaaaggaacacacatgcttgcccatgaacgtccagagacaagcaattcttgaagctcgttgggggaaaaaacggggaaaacacacctgtatcctttgtggcatctcttcccgggacttaccatatggatggagcttccgtgccactgatctctaagaaatcatatccttcttctagctgaaagtcagtgaagaccagcgcaatggtgtccccgggctcagccagaatggtccaggtgcagtccgcgttgttctcgtactctgaagggaagtgcgggctggagatggagctgctggtcccgcgtaaggttcctccgcaggctccctcagctgcaggggcaaaagcagaaagaaagcatcacatttcaggatggttttcatacacgagtgtgtccaccaagtgtcactcttgatcagcgacaaatattttctgaacccaaaattgagacactcaatctgaaaaagaatcttttggtatgttaatgagttctatgaaaaggcttacaagactctaacatttaaattatcttattaattgaatggccattgcgggaaagatggaaacggtggcttttctgaaacatggaaagtgtagttgccatgtacctgacattgataggcagcctaacaagattttcagagattttctccgaatcctggaagatgacactatgtaagcaacattttgagacttaaaaacatgtgggcgtttattcatggatacctggctttgagaatactgtgctcttaaaagaaatggttgtcttaaatttattttccataaatttgggattaatttgggttttgaatttcagatagctattgagtaacataaaagaggcacatcacctcataaaaaggttctgagtagaaaacagttacatgaaacttaaaatggaatatcttagaaaagtgataagtgaaaggccagtaaagataaaagtgcatttaaaatagaaactaacaattaaaaaattattggttagaaaggaaacagatcttggtaagtttgctatagagtaaaaaagcttctttgttacatttattttatctattacaaaatattatatgcattttaaactatatatagttgatatatataacatataatctatatggtagtttatatataaataacaaactatatagtagtttatatataaataacaaactatatggtagtttatatataaataacataaactatatgatagtttatatataaataacatataaactatatgatactttatatactatatatagctatgttatatatataaattacatatatgagagagaagtattttaaaataacatgttttaaagcatgttttttaaaatttcttccttccctcctttctttcttccttttctttcttctttttctttctttcctcaaatacttcctatccataatatatatttaacagtcattaattctgatactgcaatgtggatgatatgtaaaagtcagcctgttaccaagatggggggagtttgctgtaagcagaggttgtgtgaccggcctgagctcttacaaagtgcatatcttcgaccctacccaccctctctccaccaaaattataccgaagtgagaggaaatgacctccttttattaactcttcccaagttgcaagttccaatatttctttcatctttcagcgatgttcgttttattttggcaggatctaagcctcacaaaaacgtcaaaatagaaccaatcttgtcggcaacagtaagagggtgatataggtcccttcaaattagctgccttcagtttactcagaagaatgccaggggcataggggtagttgacagcacacggtttttgttcccggagtttggagtattgcatttcccatccttcctacgggatgccaggctggtctacacactaggcattctcatgctgtttatgtcaactaatgctaatggcagctttagaatggacgtctttgagaggtacacttggaggaaaattactaccttcaagtatgaacgaaatcaagactacatgagggatgggtgttctcatgttttaatagttagccagtctgtgactcccatccaaagcacgtgacgttgtggaaagggctgcccatgttttgtaggacatctcaggaaactcattttttagatcccaaatttattttaagattaataattattaagtgcacagattataaaaattatgctaccacggtagtgtttccttttaaaagtgtaaaaccaaacacgaataaaaataactgtgtgtatactacaatttgaaaactgcaaaagtacttcctgtgcccactaccaaatgtctgtcctgccccccgccctccgtgggcaccactgtgcaagcacacacacttccctggtcaactgagaacaagctgcacaactgcccagctcgccgcagtttttattacattcttgggaacagccgaatgtctctcctgccccccgccctccgtggacaccactgtgcaagcacacacacttccctggtcaactgagaaccagctgcacaactgcccagctcgccacagtttttattacattcttgggaagagctactgggaatgtgatcatacatatacagttccctgtcaaaattgtatttttgaacagagataaaaatcagtaccatataaaaataagaggaagaacatattccagccatgaggaaaaatacagtggctactactgagattcagatattgggcagaattcagctctaagccccttgtgttgggataatggtgaatcaggttaacaactaaaagtgactcatactctacgttgtttttctttaaacgcaaatataaatatctccttcataaagggatgaggtaaacaggatcactagagacagatatttacttttattattgattaaataactctatataaacatatcacacacattaatatttccagagtaataattgtttttcatgtataaatatataattttatttaatatttagattttattcttttctctgaattcattatatactacaaaagttatggcatctcaatgtaaacacagatgcagaagaaaagagttctaatacctttattacctaagaagataaaatatcatagatgtgtggaattaaaagaaaattatcaaagtccacgttaccaaaatgatgtagttgaaagattaatgacatattaattgaaatccaactgctgaaactacatacattcttcataattcaccttgttggcaagaaatcccccctttcaatgtttcagaggggaaaataaaaaaaggaaaaaaaaaactgacatcaaatgattatgaatttttgtcatggcagtcgatgagctgaatcactttctattatttaaaaagctttgaaatagtcgtatttatgtgcatggtatagaataaacatagaatacaagtgtatagaataagaagcttaaccgattcttctgggaaaacctctcagtaaccttgaccagaagtgaatttaaacctatctgacaggagtgtttacaggcagccaacataacagggacaccagccatagctccaggacagagtccagggcccccaccctgcagccattagccccctggtttctccactgctggaaggttcgatgacctgcagaaggtgtctagggagtttgtagggctccgggtagtggatatgagttaactggtaaaagagggttcttttttattttaacagctgacagaactgtgctggtgcccacccctgagtaccaaccctgatcaaatgagcatacctcactgccatgcagtttccttctatttaaaatgccagtggctgagctggataaactgcaatgttatgcccctgtctaatatttgagtcccctgagtctaagatcttagacacttactatctacattttcctagaatttccgttgatgaatgagtggatcatggagacccatagttcactgggccagcatgagtactaggctcactgaatccaggtaagaccagagcactgactgcaacagacaagtggtgaaatttaagggtaactttgttgggaaaggagtagatgacataaagaaggcaaaatagaaaagtcaaataaaatgaagaaaaaaacaattaaggtagcacagaggaaaaaaaaaattcccaaaccttatgactattgcatttcttcagtagatatgttaatgtccatagaatattccggaatgagttacagttagaatcaggccaaaataatatatgcaagatatattagaattgtttgtatagcactccacataaaatatagtagaagattattaagatagtctgattgattaattgaatattacacatataagacaaacaaaaaaacttcatggtactcatgggataaaatgcttaaatcacagaaaatctttagcacagaatgaggcaaaattagtgttggtgcctgtgagtgtgtgtgtgtgagtgtgtgtgcatgtgtgtgcgtgtgtttgtgtgtatgtgtgtgtttgtgtttgaaagcacctgctatagtgctgtaagtacttctctaacaaaactttttaactcttaatttctccgctatttttgtaagggattttactttctaaacagcaacattttaaacataatagcatttgaagaagagctacctaactaatatgtttgatgagcaaaacatttttaaaaataaatcagtttgtttcctcttagatctatgaagctctacaggatgatcaattttataaataatgccacagaggaaacagttttcaaagcccatttcgactgagaaaaattaattacttaatttttgatataatatttacttgtgaacttatcttccagtttagctgctaaagatattaaattgctcccacatatcgctaaaggataaaagctttgctgacagaaatgggaaccattatccctgcagtgtggagtgctacaaggacccaatatgattaaatgtacatcataaatgatgagtgaagagacattatttaacaaagtatattggaagaactgaatagaaagttttaaaatatcaacttaaaaattccctcatacaaaatacctgttacacaaattaaaatgtttgaatgtattaaataatgggtaacttgttacattaaaatataatatatggtctcaaattaagcattatctcaactaaacagaaactgtgaatgttacggaagcaaaaataactttataagtaaaccaatctacctgtttaattttttcaaaataaatgtataaaaataaaaacaacacaataaaaaaatatttgcaacaacacagcagggggatattatttatacttacttgctttgtattttaagaaacaagatacaggcttggcgcggtggctgatgcctgtagtcccaacactttgggagccctaggagggtggatcacgaggtcaggagatcgagaccatcctggctaacatggtgaaaccccctctctactaaaaacacataaaagtagctgggtgtggtgacgggcacttgtaatcccagctactcgcgaggctgaggcaggagaatggtgtgaacctgggaggtggagcttgcagtgagcagagattgccctactgcactccagcctgggcgacacagcaagacactgtctcaataaacaaacaaacaaaaaaacaaacaaataaataaataaataaatagataagtaaataacaagacacaaacagatacatgggaaaaaaagattttaaatggcaatttaaataagagtgaattctagaacaaaccaaaattaaaaacaaacacaggtgaagtttcaatctttcttattatgataggcattcaaattaaaacaacactgaaatgccttctaatatacattaaaaagataaattctgaaaatacataaatacgaagagtaaaactgatctagttgtatgttcctaatatcaacatgcattaacacagtgcttcaggcgatttaccaacacaggcgagtgacactgagagggctcatatacgccggcaaattactcaacttagggtctgatgtctactgagtatattgtacgtgtctgatattctaccaaggtcattatgtgaactatttaatcacatccaaaacgtgtgataaaatgtttgtttttgttcctctttcacagctaccaaaagagaaatgtttttcatttttttagaaaacagaacaaaacaaaaaaaccatcaactggaaaacattcagagactcagaaaatatatgatcaactaaataaaattaaaattaatcaccataaatactctatagtaaaacagaaaaaagggtataatgtctgatctgtgaaaaagcagaacaaatttatctacgttaagctgtatacatatgtatatttcaagttaactataaagactaagaaatataaacattttaatataattgtggtattatagtaatataattgttatgagggatttaaaaactccttcaatcttttgtcaagaaatagtttaacatctaaaaaacatcccagtaacattcatgaataatgaatgaaacttgggaattcttaatcatagtacgtgtagaactttatgtgtttctgagagagtatatccacaaacaatatatttaaaacatattagagatgctgttgtttttgttttaaaataaattctgccatgaatcttttttttttttttaaaggaaaggctattttatagtaaaataaaatggcctaatttatctattatatatctggatttttgtgttatattcagcaacaatgaaaacataaaaatgaagtagtatttttagcaacctaatttggtattataaacaaaacatatttatttgggattttccttctttccttcattttactattctacaatatattttagatttcaataaatttgtgtatgaaatagtcactttcttaaaaagattcagctggttaggttacaaagttgacctggatgagattggtgactattattctttattctttttttgttttgttttgtttttgagatggcgtctcactctgttgcccaggctggagtgcagtggcgcgatcttggctcactgtaagctccgcctcccgggttcacgccattctcctgcctcagcctcccgagtagctgggactacaggcgcccgccaccatgcccagctaattttttgtatttttagtagagacagggtttcaccgtgttagccaggatggtctcaatctcctgacctcgtgatctgccagcctcagcctccctagtgactcttattctaagtgaagtactgaggaatggaaaaccaaacatcctatgttctcactgatgtgtgggagccaagctatgaggatgcaaaggaataggaatgatataatggactttggagatttggggggaagagtgggagtggggaaaggggataaaagacaacatatatgatgcagtgcatactgcacaggtggtgggtgcaccatctcagaaatcaccactgaagaacttacttatgtaaccaaacaccatctacaccccaataacttatagaaaataaaataaaataataaaaaaagtttcaagcctacagacattcattgtacttgcagaaaacgtaatgcaggggcgggtccggctccttgaacagacacacgtggccgggtggtcactccctctgcaaccaattagacacagacaagtgctttgcagggccactgtctcaacatggtggccgacatgaacactgaattatctccagtttcaaatcatgtggcgatacacttgcctttctcaacgaattggctcattctttattttctgaattgtcttttattgtgtaaggacgttccacatggtattataaggtttgcagtcataaattcactctcaattgagagaacatagggtgtctcccatggatactatatttggtgctttcttcccacttcaaacaacagaagaactttcaagactccctcatttgatttgtttcagctaaatatgtggaagtgagttattgtatacaagcaaacattaacatcagaataattagtgtcagaatctcatttgcacttggcattaacagaccccggattgctagcataagcactgtcttttaattccctggtccccatgaacaggagctggctgccaaaatcactgggaattggcttagaagttgactttgcagaaccatgcatttatgttaattaatttattcattcaatacatacgaaaactaattctctactagaatgagcagagaagggttttctgaaaacacaatatttaggacagatttgaaaaaaaggaactattcaaggaatgagctggaggaagagcattcccaacagatgcaacagaaagcaccatgtccgaggagacttgatattcacatatcaaccacagatgatttatgtactgcaaattccccatgacatttttgggtgcattctcatgcagttgctgagaattccgggacagaaatatattgactttgtgcgcaggagtaaggatcattcacccacaggatcatgactctggaataaacaaaaaatgaaaagcatttgggaggctgagatggatggatcacctgaggtcagcagtttgaggccagcctggccaacatggtgaaaccctgtctctactaaaaatacaaaaaatagctgggtgtggtggtccatgcctgtaattccagcttcttgggaggctgaggccgaagaatcgcttgaacttgggaggcagaggttgcagtgagccaagatcaccccactgcacttggcctgagcgacagagtgaggccttgcctcagaataaataaataaataaataatggcaatattcttgggatgttagttttatttataattgatccttccccttgtcaaatccataggtaagcaagagagggaacagcacttgtttatgtccttttccttttaatctgcacatgcagatggcaatgtcagaatatctgatttctataaaatgaagtccagactggaaccagaaggaactcaccactatttattacggcttatatcaccattcatatttcttttgtcgctgagagaatccaggacttttcctattttttttttttttttttttttgagatggagactcactctgttgcccaggctggagtgcagtggcgtgatctcggctcactgcaagctccgcctcctgggttcaagcgattctcctgcttcagactcacgagtagctgggactacaggcacacaccaccacacccggctaatttttgtgtgtatgtgtgtatttttagtagagacggggtttcaccgtgttagccaggatggtctcgatctcctcacttcgtgatccagccacctcggcctcccaaagttttggtattacaggtgtcagccaccgagcctggccacgacttttactatttctcagtgaaatcaagcactgatgcccactttcatagaacatgccttctatatattttctattcaaagctgtgaactactcaaatcaccactcataataaaaccaaagcttaccaggccctgaaaggcattatgtgagctggaatgttggcttcttctgttcctcatcctccacctcctttggctcccatttcctcttttcctcactgggtctagccacactgcttcctggggccagggcacctatgttcctgccctaaggcctttgcaatgaccacctgcctgagaagcacatctccctgtctgacttcagagcccctcacaaggcactttcctgcccgccctctctggccaccatatttaaactagcactcacctagattgcttcccacctctccatcctgtatgcttacctctcggtgcgtgctgagtgcaaagcaatggaatgcaagctttatgagcctgttcttgcacttgcgtgcacctgttcctaggaggcggcctgatagaagtattctttcttcctctttttttttttcatgcaatgaatgaaaattgaatgactctggctttcctacagttatatcagttgcaaacaagcctctattcatttgtctttaacaagtgttgggactatgacaaaatatatttagggggctatgcacggaatcaaaccatatcctctctaagaatagaagaagaaaagtttatttagttatagagatctgtggctttcttaagaatgagtgttaaaaaaaagtagtctataaaaactgcctcaagaactcttaatagagcgaaatttcagataaaaattaattaccaaaaagaacgattcataattgtagcaatccataagaggtttatttgtgtgtttttgctttgcttgttttcagcaagcaggaaaaccacaagtccaggaggttttttctttgtttttaaactcaccagagctgcatgaaataaagtcaaggcaggtagagaaaacaaaatagtcacagcaaaacattttaaaaggacaaatatgagcaagctacagggcagctggaaaaattagttcaagttccatcaagttcaagtttaacttaaaaaccacatataaaatatgaaatgtattaaaatatgtaattattaaaacaaatatagttattctgttcaatttttaggtgatctattaatataatggaagctccttttattccatggatactaataagcatgaaaatatatcaaagttttcagacactaatatgtattatataatttttttttatttggaatctgaaatttggtgacagaattaaataaatgctatttaaaatttcagctctcccttgtttacacatgatgcagaacaaaacttgaagttattgttgaaagttacagataaatacttgattgttaaagttagcacacaacacatgattcagtattttctttctttttttcttttttttttttttttttttttttttttgagacagggtctcgctctgtcgcccaggctggagtgcagtggtgcgatctcaggtaactgcaagctccccatcccgggttcacatcattctcctgcctcagcctcctgagtagctgggaatacaggcatccggcaccacgcctggctaattttttgtgtttttggtagagacgggatttcaatgtgttagccaggatggtctcgatctcctgacctcctgatccgtccgcctcggcctcccaaagtgctgggattacaggcgtgagccaccgcgcccagtctgattcagtattttctaaattgtgctcctatgatttccatgccaaagagttaatgtttacaaacagcaaaatcgtcagtgggtaggttttgtgcccataccgaatttccatcagagtaattatttttaaaaatatttttcctttattgagttatcataaaattctgcatttgaagaaaatgttgtgcagttaaaaaatggttgaacaccactgacttaatccaagaagaacataaggcatttaaggaaagatgcatttgaatctatttatttctgtaggttgggaaaataattctaaatgtaagtgcaaatcagaatgaactgatttctatttcctcccaagtaatttcagactttttaaaaaagtgtatttctcaactctagaatttttgtgccccttttgtgggtataaaacttgctggaaatctatcttacggacataatttaaaatacagaatagaacattacttagaagcaaactgccatgtttatcataaagaaaaattgaaataatctaaatattcaacagcggatacatcattaaataagctatgatacattcaaaccatagggtcatcaaatgtgtttaccaagcatttataatattccttcagtgaatttctaagtcatgatgttaaatttaaaaatgcaggttatacagttggatgtgtaattccaactcaatttttacaattgcatggggaaatatccaggaaagaaataagaaatacacccacatatgtaatataatagcttgtaatactgggagatattattgaggaaggaagggccacaaagagttggtggtcaggatgtacctacctccacaggcgctcactcctccaggagccagaatgaaaggaacccagagacatggaccattcctgctccatccccctccctcctgttctcagagagtcaaccccacttacttcatgcctgaggccattaagagggtactctcgtacatcctttgtcttcctttacaacagtccctgcaaaaagccctggtctcctctgtcgccctttatccctccaactctcatcctctaaaagatctacacatcttattttctgaccccctaatcttaattcttcctatgctcctgaatgtctcctactacttcctcgaaaactgaaagtcaattataaacagaatttcctacattccaactacttctgacatattttccttcccttcttcctctgatggaaacctgaatgtcttctctgaagtcatctcagtagccaatgttttacatctgtagtccacgtacactggtcctgctggcagactgtgcccacccacatgcatctcatggctacttccaggtgactcatggtcttccctccctcatgtgcccagctttgagtctcttgccataataatctggcaccctctgccttgtagtcatctacaaacccctacttgaaatccactattccaagaagatttaaacttcgggccctctgtcagcctcttcacctctacctctgcacaaattctcggtcatttcaatgtcaacacaggtaatcctgggaaaaacataacctctttgattaattctcccctctcttccaacagcccaactctacctcagccatgccatcaccattcccatcatcaccctctatcttctcactaccagtaaggcatcagtttctacagctgcagtctgactacattctgagcccaactctccataccaggtcacttacccaaacacctaaactcataattttttgactcatgggacctagagttccctgactctgcctccccttcactttcttttccttgtccctatcatgtcctcatctcttgtcttaccatccttagggctcatggcctaatgcacttccttgcatttaccataactctgccatcatcacagtaaaacacctttggttccagtctaggccaagtccacttttatatccttgcaggtaaaacagctggaggaattccaaaaccaaaaacatactgaaaggtctaactttacatatatggccataatcctacattggcccataatgatgcccagcaatcccgcttcactttctgtatctgttcactgctccctttctgggggatgactgtttcatgccttcttccttctaaagctgccagcatctcttgccaaatcctcactgccacctgatgactttggtttccatttcacaaagaaaatagaagcaatgaaagataaattatgtaatctataaccttcaattttgatgcctacttataaaatatctttcctgcaaatatttctacctagtgggtacacctgtttgtgttctacctttcctctctgatcaagtttttaagccacgactttaccagttttcttctctttcaaaacgactatttgtgtttttagtggagaattgctctctgcatataaccgtgctccaattgcccccattcaaaaacaatgttatagacttttcttttgattccatgtctgcttccagactccacattcccctctagccttactttctgaaattcctttcactgcaacacgtctcaaagatgtccacatttgcggtctttaaccttgttacatcctctcttgaacccacttgagtcagagtttcaccctcctgggtttcctgcagaaggcccacatgtcagccacagccagaaatccaagagtcagttcctaggattcatctcactcaagatctcagtgacatttaacattcatccatttcctcatccttgaattcttttcattcctacacttcctaaatttttaaactacgaaataattagaaagtcacaagaacttgcaaaatagtacggagttatcagcatacttttttctcattttctcccagtggttacatcttatacaagtgtagtataatattaaaaccaaataaaaattacactggaataatatgtgcacagtcatctttggtatccattgggaattggttccaggatccacaatgctcaagtcccttatataaaatggaattttatttgcatataacttatacacatcttcccatatactttaaatcatctctccattatttataataccaaatataaatgtcacagaaatggctgttatactgtattgtttaggtaataatgacaaggaaaaaaaaagtcagtacatggtcggtacagatgcagccatcatatgcctagctatattgtagacatagccacaatgaaacattttctagatttaaaatatatatatatttttcatccacatttcattgaaactggatgcagaacccaccagtaaacagggctgactgtatatgattctatgccgttttactcactcgtctctttagatactactcttcaggctttctctaatcttattggccagttcttctgagtcatcatgccagtttcatttcatcttccaatccttggtagggtgtccaagattcattctcttcacctcttctcttcctaaatacattcattcattgccttgttgatctcatccagtttgcgtcgcgtggatttatttttatgttttattcttaacttttatttttgtttcaggggtacacatgcaggtttgttacttgcataaatcttgtgtttcgaggtgtggtgtatgcatgatccctacacccaggtagtgatcacagcacctggcaggtagttattcaaccgtcaccacctccttcctcccctcagtaggcctcagtgactatgtcatctgtatgtctacagttttcagagtgtccatcagttccatgaatgtctcctgaattccagctttatgtatccaactccctatttcaactccatagaatgtctaaatagcaatccagactaactagccctaaaatggttcttttgctctttccattttcaaatctgcaatctcacagtcttctccatctcaataaacggtaactccattcttccagtgttgcacgagaagacacacggtgccatccatgactcttctatgtctctcatgtgtcacaaccactgtgtagggaaattccatcagcaccttctttaaacagcattctgagtccaaatgtgtctggccatctcctctgctcctgtcatctctcaagtaacaacacctctcattttcattttgcaatgattttctaataggttttttattttttcccttctcagcttatgttcttttctcataagtagccagagtaatcctctcaaatgctgtgtcacacgatgtcgtttttcttctcgtatccccccattgtgctcccacactgctcagtatagaggttaaagtccaaaggctgatctacagggcccactcctatcctctgggatcctccgggacctttcccctctcctatcctctgactgtctctcctacaaccctccaattatcccatctgctcaggccacactgccgttgctctattcttcgttcactcaccgtacgctgttgtctcaaggccaaacacctggttgatccctctgtcagaaccacatttctgatattctcgcagggctcactctgtcccgttcattagaggtccaaatattccggttttctactatcaggggggtttccaggacatgggatcttaggtgataagaccaggagagtcctgtccaggcagtgaccaggcagatggtcaccatagctcttaattacatgtcagcttctcagtgagaacacttacaaacacttatttcaacaggacagcaaagtttatctgttgcttctcatttgcttatttatgttatctatctccacccattaaaatgatatttctgcaaagattggaattctttcttgttttgttcatattgtagccccagcagctacaacaaatgttggcgaactatagcttgtgggttacattcagtccagtatctggttttatacattaggctttactgaaacacagccagtctatctgtttaggtggtgtctatggggtcttttgatctacagtgacagacaagggtagctaaaacagagatcatatgacatgaaaacaaaatatttgctatctggcctttgacaaaaaatgtttaccagccctgattgataagtgtatgtaatactttgcaggtcctcaataaacgttccttggaagaaagaattaacacacgtaaatactgaaaggacatacggagaaatattgatgtgtattggaaatcaaaggcaataaaaacaacttttgagcatcatttcaatgccctcaaactcagcaaattaaaaagaaatgcaagtatcaaaagttatattaattgtggtgaactgtcataacattagaaatgcattcattaagtttgcaaagcataaacaacattcctagaaatctttccttaggaaaaaaatctaacagaagcaacaaacacagtgctatatgtacagagacactaattatggcattgcgtgtcgaagtgaacatgggaaacattcatcacattcaattatagagagaaaataatctgtaaaatattgagaatcaaattatgtcaatgcacatagaagtgtgtatgatttaacactaatcttctccaggagaatataaatgttctctgttctgtgacttcagcctctaagaagctttttagacattgagttggcttcttttgatgtctgttcccccttactcttcaaggactactatgcgatcctaatagccgttattggtattaagcacctggatcatctcatctaatctttatcactcctgtgagattaaaagtaatattagcccaacttaacaaattcagagcctgggtcttagcaagaaaagagctcgtctgagctgtgccaacttgtgatgaggctggagctagaatgacaaagtccttgctggtaaacacttcgcatgactgcccatcacaaagaagggcatttacctgggcatggattcattctggcactagacacattcatctttacagctctataacctaacatggtatctgcatggaataaaataattttagaaatactacaaagtaacccacaaagctgaaaataatgggcagagccacttctgattattttttaagcctgttacaagattgtatgggatgagataacgtgaatgacgtgcttggcagaaaatgtagcacagcaaatatgcaaaccacgtagaccaggtttactagaatctaagactgatttttttgaacagttttaattttgatacgatttacactggaattgtttattgcaaagtatgcaagaaaggtgcttaaaaccaaattgtctaaaactactcaaaaaattgaaagctaggtttcttatataaaaactgtcccattcagtcttactttgtatttcttgtcctgacgtgacagatcatttaagattcattttacaatgttaccgctgaaacataattgataaaaacacagctgtgttttaaatatcgcagaatttataggcacccataaaaagcatgacttctcttccttctcccctctggctatgtcgttcctagttttcctgccttttcatctctagtagcagaatgcctatgattaaaaaacctcgactgacagttcatatagaattggcaagtgacatattgccatttccagtcacattacgtaaggcttaacaattaaagaaaaccacagcttcagataggtctaaaagcaacaatgggcctacactatttagcatgttttattaaaggtatcagtgctactgctatgttatttagtggcatcttggcccaatgactatcattcagtctccaagaaatacaacagtctcaaaatagataaaaatcagtttgaatcttaaaaaaaaaaaaaaaaaaaaaactcaagacagctgctacatcccattttatctaaaactgttgaaaaatactgacaatgtgttttgacatgtttaggtgaatacttatcttaaatgtatgtgttcagacaaaaacaagggtgaaacttcattcactaagcaagcggcgtaacttcccaataatggttcgtatgctgccgttttctatggtttacatctcatgcttccaagcaaaacagaaacaaacaaatggcaacaaacaacaaaatgtctcttcaactgcccccaagaaggttgccgttggagggaaatgtagaaaagcaccaagtcagagctggccttatcagccactgtctttcagccttggacatgacatctaagctctcagagaatgtgattccatatctggaaaatctacccattaatatttaccaggaaattttgggatgggatcatataaaagttcatataaaacattttagataggattgcataaaagcattgaacgttcataacgtaacacttgccagagaggtttagtctaagtaaaatatttagtcatgtgatctctccattccctttgctttcctgcttgagtaattcataggtacctaaaaagattccagtagatggaaatagaaaataaatggggaataattaactactgaccaactgactctcagacattttgcaatctcctcttgcctgaattggcttcccgagatgatcgagccagtggcagagaagatgcatgaccctgcagctgcactgagcctgtctcttagacgtctccaggtctcaggcctctgcccaagaatgcaagcttcctggaggacaaggaggtccaaggttttagtgaaggatctggggctatgagaaggaaagaggagaaaagatgaagattcacttagtcctcaatcctaaaaagcctttccccagatgaggaaaattatttgggtgaagagatgactctttgctttgtcttctacaggtttgtcttactctgtaaagcaagagcttcagcaaaatagatttagcctttaagtaacatgttaggaagaccctatagccaaaccaccctcttgggttaagggctctgttgacctaagtttatgtgtatagttgggtttttttggtcgttgttttatttgacatccatgaggttgttggaagtcatgtctatcaaagaccaagaacagcagttttagttgggtatggttcacaatcctgaaaaacacaatcccaaatgccataatcccaattgttgaaatctcaaaagatgaaactccttaaagtcaaaatccctaatgtctaaaaccctgaaatcacaataacagaaatcatagaagactttcagaaggaagagccacatcataaaggaacaaaagcagatattcatccggaggcaagacttcagaatgtactcagtgaccgcggtgttcagccagccttgctggacgctctccatgcaattgtacatatctacccctgcaatacacttttgtgtatgttgaagcttccttctagatatctttttttaaagttttttctactattttaaattgtcagcactatttttttcacaattcaaggctatgcaattcatcttctcatcatttctaatatcaaatgccacataatttctttctttttaggggagggaggacaaagtttcgctcttgttgcccaggctggagtgcaatggtgcgatcttggctcactacaacctccgcctcccgggttcaatcgattctcctgcctcactcttcctgagtagctaggattacaggcatgcaccagcattcccagctaattttgtttttttagtagagacggggtttctccatgttggtcaggctggtctcgaactcccgatctcagatgatccacccaccttggtctcccaaagtgctggaattacaggcgtgagccaccgtgcccagctgccacctcgtttataactctaaattgtgtagaaaatattagagagttctaattaagaattttttttttcaaattcgacttcaaaaactgcatggtcacaggattgactttgtgcctcggcattgtgtgtgcatggtacaaatgctgaaacttcctaaataaatgaagagatgtcctctttgtaatctgcatttggaaaagataacatttctggagatctcagctgtttgggtgactgtatatctggtggtgatccatcatggttttcaactgaccaaaggacttaggctaatcatcacggtatttctgatgactccaatcataaagctggttgcacacaatgggcaactatagcggcatgcatttatacatgttgcattttgattaattgcttcatgagtatggtttgtccactcgtaactgtcatacccatgaaactgtcactagtgtgggtatgtatgcttgcaaaaataagctggttattatagcctattgtatggcataaagtatcctacaaagtgttttgtgtgtttttatgtcttttttcaaagaaaccctttataaaaaataaatacacatcttttacataatttaaaaatattttccagaattatattttcaggattctgactttttatgatttaaacatttggtattatggtgtttgagagtctatcttttgggattacagtctgtggccatttttatcaaggcctggcttaaatgtgtattcattttcatccacaaataatgccgaggagctgccatcatctttctctcttggcaacttcctgcctcgattcctgttctctcccagtttgcaatctctgagtagctgcaggtctgtcaacacagctgtacctactttgcacaaggagcaggtggaggaaggggaggcagccaaagcccagcagcttccctctctctgggaccagccagttacctgctttgatgagaaaagcagagcctctccaggcaaccagcaccccctgccccactcagactattcaggattcaagcacatgtttctcaaggagaaaacacttgtttaattcaagttgtaatatttgtttctcaattttaagttaggttcttttagaaatatttatttttctcttgagttagaagagaacggacagcatgtgacaagggccgtggcacagactctgtagccaaagtgtccagggtcaaattctgccttccccacatacagcgtgggaccttggtgaagtcactgaattcctctgtgatggagtctcatctaaaccagagggatgatgataatatataacttctagacttgtcatgaaagttaataacaagaacatacgtaaggcatgtaaacattgtctgacattttgtgattgctttgtgtttaactctgattaccacactttcttaaaatctacaattacagtgactaagatgaaatctttatcgctttgagacagatgctactccatttgctagaaattgtctatatctggactactgctagatacatatttttgtactaggccatggtatcgtaagacttaaagaaaaaggaaagaaacacaaaaagcagctcaacagtccaagacaggtttattatggacaataaacctgagagaggctcctggctgagttaggtcagaggcactctctcttacagactaagagtttttaaagattcagggcgagagagcttatcacaggcttggaatgtttctgtgtctctctcttgcttatctgggagggagagttttgtgtctgttcccatacatctccgtgaagctgcaagcatactaccaagtctgcttttagcttccctatcttcatgtacctaaaaggaagggaacattcccttattagggcccttattagggcccactgttttactggggcccattgcatgaatgtgaagtttggtggttacccaagagacattccccattccctctgtgcctgagctgtcgtatctgtgttttacggtctgctcttgctggctgcttgttgtcagaagacaagtgatttccttgaaatgcatgaggttagaaagggagctggaacttaaagtggcagttgtctgagataatgctgctcctgctttgtcagttatttacatgcacgtgggtatgaatgtgcctgttgtagaagtagttttcccaatatttctgtccaagtggtggtgtgtaaaataaagtgacccactgccacacaggcctttctttcactaggcactcttgtcctttttcctgagccccaaaccatttctctcctcaagtcagtctgctagtttcttattctaaagaatagcagtaattcattaaaaaaaaaaaaaaaaacccttttttttaagagctaccaatattgagatcctgtagcttacatgaatttcttttcaaactgtttgccattccgctctgggcacttagttctgaaatctaaaatcgtgcttaagagtggaagggagaggagatagagacagtaattatagcagctgatatttttagagtttctctatgtgtcaggctctttgctaaccattttacctgggttatgccatttaatctttacaacagatttctcaagtaggcacttttatacacataaaaatcttgaggccagacagattaaataaattgaccaaagacacacagtgtccaattgacagcactgggatttgccccaggtgaccagtgcagagctgctgaacaagctgtttcaccacgacaagcactttaatccccttctttctgtgctcaagactgcaagatgttgtatttcatttaatccttaaactgacactgagcatgacatctgttcaaaatatttactttttctatgctctattgatattataggatagggcttggttatgtgaccgctagggtcaggctgcctgggtccagatctcacctctactgctttctggatgggtgaacatctcagataagaagaatacataaccaagatggagaagtctgagaaaggcctccaattctcttatggtaagagatcaaaactgctaggtccctagaatcactcttctttattttttcttacttattccaggacagataacaaagctgttttcattttactccctcagcgaatccgcgtgttcctcaaagtcttctgtaatcttcattcattagacccaacgtcattacttccaaccttgagataaggtctgaaatgagatttcttttgagaaaactttttagattaatcaagagttagctcactcttatcttttgcctaaactaattttaaaagggaccctatttttggtcctactcagctcaaatatgcttcagcaattgctgaaacttaaagggaagaatttccaacacattgtgacgtggactttgatatctcagacccattgccttatcagtctttatgattaaactgcatctatttattaaaccctacaacgtaagtgagaataaaacccagtgacagcatcagagctctacaagcattagcaataatgaggatagaggatacaacaagtttaaagttgaggctcaatacagtagcctgaagtgtatgcagctcatgagcacgtgaaatgtggctagtcagcattgcaaaatggcataactgaaatacacatcagattttgaaactagcatcttttgaaaatcaaaatacttcacttacagtttacattaattctgcattaaaattataatcctttggaagtatgaggttgacaaaatccattattaaagtttatttcacttgtttcatgtcacattttccgtgtcgcatctggggatttttaacttcatctgtggctcacattatggattgtgttatatgttgagtggacagcactgctctaattactaaggacctggcttttgttggttaagcgtgtggcagttgaatccgctacatccccagcatcgtcctcagtagagtgtggatgctccagcaaggatcagctccttctgagcaggtgcacctgggatcatcctcatgctaagtcttatcctgatgccctcaaatgacttatcacatgtagctgctctttttaaactctctctccccatcccttttctcttttggcgcatacctgcgaaacttgttcggagtgactatttttttctctatgtattgttgcaatatccctttacctatccccgtcccctccccaataatctttatcttgagtgacaaatgaagaagccatttagtgataaaactaaattaaagaaactaaagacccggggctctagttggctcagagataacaatgaaatagtgccatccccctctctagcttgtaaggaaaacaaactaccccagatcatcaacaaagctgactagctcttttgatctttatttttttcaactagcttcagtcaagtgctgcctaggaaaggatagttaggtctgtctaattctggagtccaacactggaaagtccaggtgcctatatttttcattctttaatatacagatgaatacatatgggagcatgtatccacacacacacatatatatatgaatggatatagaatatatatatatacataaatatgtatatatttgtatatatattaatatatatgtatatttatgtgtatatatatatatataacaatagcattgttattggtaataaaggtgctgactattttggtctatgcctcactattcatttgcttatctcttatgtatttcagatttcagacaaggaagagaagtattatttagtgaacacccctccaattcagcagaagtgaatagcatacttaaaatcatgaagcaacactgtaaaaattatgggaggacatattttctatgtacagtttgtacttagccaatacatccatgggcgtggatgcagataaggacatttgcagccttgctcaggtttaaagacttccctccgaagcaacatttggtagaaagcatttgaggtgaaactgaggcacaagaaggtgtcatgaaacagggtgtgcattgagggcacgagtaaagagaagcctccaagttactgctttgcgacagtcctagaaaccattctggaaccctctgggtgagcgctcagggagagaaatgtggtagatttgggggaaatgaaggcaagtgggatattgaaaagctgtggtgaagtgacaactcactggatgaacagacaactagaaactttgggaatcagagaaaacaattgtattccacatattaagcaatcgtgtaagttagagaaacaattcagtggtcttcagaaagaagaagagagttcattcggagcaagaattcacatagttaagaagcagaaaatacatggattattgtgatgaaagcaagtgtgcaactaagtaatgagagaaaaataaggataattcaaaatttgagggcaaataaatagcagtatggcaaagatgggacagtcttttaccaaatccgtgtttttcttcttcctgagctcacagatgcttccatttcctggctctctttgcagtgaaatatggcctcatggttgagcttcagctaatgcagtggatgtacaggagatgcactctaatgtgtggaggaactgcccatcacaactcaagttcttccttttcacccagtgcaatgttgcaggctacagaccttcagggaagccagatgtgaaaggtggccatctccaaatcaccgctgcgcataaaaacatctgaaccaactacccatcattgagactcattttgaatttaacttgagcaaagagtatttctgtttgagcccattaatactgtattaatgaaacaagcagaacaacaatgccctggtccaaatgtgaaacaaaagtaattccaatttcattatgaataattgaggcaaagccagcactcatctagactctgggttgagtagcattagggattgcaatgttggaatcacagaagaggaagtctaattacaggcatacgcttggctctgtgctgagcaatattcacgcacttaccaaaatatgaatgcttactgcttttcaacttttttttttttttttttcctgacacggagtctcgctctgtcgcccaggctagagtgcagtggcgcgatctcggctcactgcaagctccgcctccagggttcacgccattctcctgcctcagcctcccgagtagctgggactacaagcgcccaccgctacgctcggctaatttttttttttttttttttttttttttttttgtgtgtgtatttttagtagagacggggtttcagcatgttagccaggatggcctcgatctcctgacctcgggatctgcccgccttggcctcccaaagtgctgggattacaggcgtgagccacagcacccgaccactgcttttcaacttttacaagcagactttagatacattaagagcgacttcattattattatttaattaaatataaaggctgacatatttgacactgcaaaggttctattgcaattgagagaacatagaggccaaaacaggagagaaaatatactagaaagagtagaagcaagaatattcacatcttactaaatggaaagacaagagatgttaccaaaaattaaagaaatacagcataaagaatcagttgtattattccagttcataaatataacagatagtaagaagacatgggaaacagaagtgatgtaacatattaatactcatatcaaggtgtcaattgagaaagttcacaacggataaagcatgaagaataatgtaaacaaattacataaaagacaataatgacagaaaaccagaaatggttaaatcttatggattctgtggcataagagtatggatacgctgatggaagttttactttcatgggaaaactttattattaaactcttcaaccatgttcatatgttactgatcttcaatgttagtaaagttgggatgagaccacccaaactatagctgacttgttacaatgtccaagtcagaaatttaaatcagaggtcaagtcaatttgagactttagtttttcacccttattacagaaataatcatattttccctgcccatttcttaaggttctttgaggtacaagcaggatcttgcatttatgggcctcagcatattgccaaggagacactgcataaatgtgacttgtggataccttcctatggtggttcattggagttgcacataggagctactgcaggccgctctgtgaagtacggcatacataaacatacgtagtttatgacagcttgtgactgggaacttcctgagtatgacttcagggatctaagctctgcaatgctgctgagaattgttttcttaagtaaggtttgctaaaacaaagtgttccatcatagaataaatgaaagcatgtaaaaaggtggtgttcaggtgagggagcatgaatctttgtctgaagtacgattggcctgggctaggcctgggtgggtttaaacggcctgatgccttggtgattacataggtagaattaggcagccgggacaacatcagactaatactcacaaaaataagattcagaattggagcaatggaataaaaggggacaccgaaggggctgcaagagatgttgagactgtaattttccatggatgtgagctcctgtgaagaaatgcaccccctcctgggggagtgttctggatcagatgttagctttctcatggaggaggattttctaaatacaaatatttacctgcttcctttctaccttcttgtatgcccctatccaaaatccacacagtggaccatctttcatgttttccagtcaggaagaataccttgttttgcatttgatcctctatttccctgtaggaccctagatctcaaagtaatttataatctatcctaggctgtaccattattatttaataatttatgaatcaataataaagtatgggaaacataaagcaaattaagaaggcatttaaatcaagaggcaaaagcatttttcattgaaactatctagctgcttcttctcttttttcatatttctcccctagacagacatcatgcctgtaagaagtgaaacagtaaatcctttttaagactggcagaacatgccaataatatacaatgaataaggtgaattaagaaagacacagatcttaagttgaaagactcaagaataacgaatagttgaaagattacctctcaagaaaaatgaattttgaggtctcatttttaatgtcaatgtgatgtttgttccctgtttaagggacacagttttaagcaaaggtgactggcctctgatttagttctgttaattattttctattaattaaatatacagttatacctttttctttaaagaacatcacggctacatatataatacatttaggtgtcattattcagggaaaatattgctagtttgaataaattataaacttttataaccctggcaaaagatcattgtagaaggagacagtcatgctactgttaggaactctataaaaaaaaaaaaaactcttcaaccagttcctgcaaataaataagtattaatagaactttggggaagcagaatatatactcatttcattcgtgtgaattatctcagtccatatggttgaaatttacatctctcataaatatgtcacatttacacatttacaagaattagatcattttttctttataatctagttatccaaatccatgagaaactgtgctgcatcattcaaatatgttttataaaataacatgtaatggaacgcaatttgaagtcatactacaccagacactgagaaaagcaaaatttaaatgtaaatgtaataatctataatacagaagaacaaagtttcctgtgataaaagcacactgatctcattgggatttaccacatgggtggcagcataggaaagacacttagctgactgttatgtcaactttgactacagatacgattatggaaattttaaagatcctccaattaagaagaaaaccactggaggatatgtaagcaaaaaagcaataaacaatgaaggaaaatactcttggcttaggccaagttttaatgtcacaaggaactaaggacactgccactcacagttttaatggtggtatcttatctcctgggaagctacaagctaacaccattaagatattatgtcaaaatataaaatagcaatcagacaaatgctatctgagagatcaagggacttcttttttccttaaagaaactgtaataaggggttgtaatgataactaaaatttagatttaagtttgaagttgacaaatgattaagatttatggctgtagggagatgacagggagactctgtggcagtgtaaaaacctgagcaaaagtttggaatttggcaaggtgtagtatgctgctgagcgaattctttaaaaaccaaccaaacaacaaacaaacaaacaaacaaactgaaaacctactttgcagtgtttgccaattcttatgctgtagtcccactatgacagataataagctaaccacatgatgtcaaggaacacagaacttggaaaagaagcagatagttctcaggccagccaggataggtcggccacagaaaaacacagctttgtggagcaaaaagctttacactcatgttgggtacactaccaggtggaattgcaccatttagttacgacgaggtaagaagcatataggaagccctgttgaaggtttgtactttattctcattgagtcaccaaagtagtttggctgataaaagaaatgttaggatgaagatggatgttaggagagagtgagtcaggagtagaaagtaggatgatggtatgctttggctgtgtcctcaccgaaaatttcaccttgaattgtaacctaaattctaatcccctaatccccatgagttggggaggcacattgtgggaggtgattagatcatgggggtgggtcctccatgctgttcttgtgacagtgggtgagttctcatgagatatgatggctttataagggtctttcacccttcactctgtacttctcgctcctgctgtcctgtgaaaacgtgccttccatcataactgcatggttcctgaggcctccgcagccatgcagaactgtgagtgaattaacctcttttctttataaattacccagtctcaggtatttcttcatagtagcatgataacggactaatacagatgacaactgacattttagacatgggggcccattgaacaaacttgaagccagtctgtttgagaagggaaataaataactaaaataacatagtaaaggcagaaatggaagtaaggccaagacacttgaaatgaagagtatgacttgagatctacatgatctattaaaaattaaataaataaagagaacaaagacacagtaactttgattttttttctgagagtgagaatgtaatggaaataatggtagaaataaggaagaagaaagaatatatttaggatgcccaatggcactctcttaagtgagatcaattaattgagaacagtctgtggaaagcagatgggatacaggtttaggttttgaggccaccactgttttgacaacataaagatgaaaagtaattaataagaaaaaaatgaaaatggacataataaacttcaggaacatgaagagaaaatgagcattttagaaaaaataatgggcatctagagtaggaactagtcatcatatgaatttctctaggacagaggaataattcaaatacgattaatcccaaatctaacatctattagcacaaataccttgagcaagtcacttttcctacctgaagtccagattccccacctataatatgaatctttaataaaatgcctacttatgaagattaaatttgctaaagtagtgcctggcttacagtaagtggacaatacatactagcttgtggggtggtggtagtagtagcagtcatcgccgtcatatgccattatgaatacaataaacaccaagcagatctcataagactctaacattttacaaaaaaaggaaaaaaaaataggcaaatatgcaataactagcgaaggataaaataaaagcatactgaaggaaataatataatgttacatgatgacttgcagtggagcctgtaaattggcatgcttacaatcctagattaaaagccagacttgtgtttgggtcataacatttactatctctggaaccttttgcaaattaaaactctatttctttaccttttaaatgagtgttaataattattacattagtgcttgttgtgagagttaaatggtataatccaagtgaagtttttagcaaattttctggcatctcattaagacctcaataaatgttaggtatgcttttaattttgtactcaaaagataaatttttcttaggaaagtcaaaacctaagagttgaagtatgctcttttctaaagtcattggaacagtaaaatagtatttttggaaaatgtaaaaatagcagtgttgcaggtaaaggaattctcatcttgctctgaaatatgacaacggcacttgggagagggcactaacttacaatcaccttatctgagaagactgacagtgttgaaagagttcttaaaatatacacattaaatggtcaaggagtgtttgtaatttttaataaaaaagataaaaaggaggcaacagggctagaaggacataaacattggcatcaaatctttgaatcctacaacgagaggtgatgaaaataggcagaaatccatgaagactgaaaaacaggatgaaaacaattttggatatttgggggatataataacaagttgcattagtctgttttcacgctggtgataatgcatacccaagaatgggcaatttacaaaagagaggtttgatggacatacagttctatatggctggggaagcctcacaatcatggtggaaggcaaggaggacctagccacgtcttatatggatagcagcaggcaaagtcagcctgtgcagagaaacacccatttttaaaaccatcagatcttgagagacttattcactatcacaagaacagcgcaggaaagaactgcctccatggttcaattacctcccactggcttcctcccacatgtgagaattgtgggagctgcaattcaagatgaggttttggtagggacacagccaaaccatatcatttcgctcctggacccacccaaatctcatgtcctcacatttcaaaaccaaccatgccttcccaacagtcccccaaagtcttaacttatttcagcattaactcgaaattccaccttccgaactcttatctgagacaaaacaagtatcttcctcttatgaacctgtataataaaatacaagctagttacttcctagacaaatgcaggcacaagaattgggtaaatacagccattcaaaaatgggagaaattggtcaaaacaaagggtctactggccctatgtaagtatagaatccagtggggcagtcaaatcttaaagctccaaaatcatttcctttgactttgtgtctcacatccaggtcatgctgatgcaagaggtgagctccaacagtcttgggcaggtgtacccctgtgactttgaagaatacagcttccctcctggatgctttcatgggctgctgttaactgtctgcagcttttccaggtgcatgatgcaaggtgtcagtggatctaccattctggagtctgaaggatggtagccttcttctcacagctcaactagggcggtgccccagtagggactctgtgggggagctctgaccccacatttccctcctgcactgccctagcaaaggttctccatgaggaccgccacccatagcaaacttctatctggacatctaggaatttctatacttcctctgaaatctaggcaaaggttcccaaacccaaattattgacttctacacattcgcaggctcaacaccacatggaagctgccaaggcttgaggcttacatcctctgatgacacagcctgagctttatgttgcccctttcagccacagttggagcagctgggatgcagggcaccaagtctctaggctgtacacagcatggggacccttggcccggccctcaaaactacttttattctcctagacctccaggcctgtgatgggaggggttgctgtgaagacctctgacatgccctggaggcattttccccatggtcttggggattaacttttggcttcttgttacttatacaaatttctgcagttggcttgattttctccttggaaaatgggattttcttttctatcacattgtcagactgcaaagttcatgaacttttatgctttgcttgccttataaaactgaaagctttacagcacccaagacacctcttgaatgctttgctgcttagaaatttattcctccagataccccaaatcatctctctcaagttcaaagttccacaactctctagggcaggggcaaaatgccatcagtctttttgctaaaacgtaacaagaatcacctttggtccagttatgaacaagtttctcatctccatccgagaccacctcagccaggatttcattgtccatatcatcagcactttggtcaaagctattcaacaagtctctagagaattccaaaacttcccacattttcctgtctccttctgagtcctccaaactgttctaaactctgcctgttatccagttccaaagtcgcttccacatcttttggtatcttttcaggagtaccccactcctggtaccaatctattgtattagttcattttcacactgctgataaagacatacctgagcctgggcaatttacaaaagaaagaagtttaatagacttaccgtcccaagtggctggggaagcctcacaatcatagcagaaggcaaggaggagcacatcacgtcttacatgcatggcagcaggcaaagagagagcttgtgcaggggaactcctctttttaaaaccatcagatctcataagacttatgtgctatgatgagaacggcacaggaaacacttacccccatgattcaattaccttctaccaggttcctcccacaacatgtgggaattgtgggaactaccgttcaacatgaggtttgggtgaggacagagctaaatcatatcagaagtcataaacttgctattgactttatgtggtccaagcatgacttttctcgtataacatgtaatattatatattattacttatcacatgttattacttacatactaacatgcaatattaaatgttattacacattacatgttatttcttacatagtaataacatgtaatattgctttcaggagcagaatgagctgacattgtaagagtcagctcaacatgtattattttcatttaagtggaaactttcataaaagcatctccaaaaccattgccctgccctggagtctgctcaccagcccccttgtagcactgtacctctgcaaaagggagctgggaagtcccacgatgcaccatttcctgggctgacgatgcaggtcaggatggcgtggccttccaagatgtagccagggaggcagctgtaccggattttgtctcctatgttgaatctcgttccatgcagaactcctttcaggatttctccaggatttccacaagtgtggctaggtaaaactattggaaaaagaaaagaaaggagaaaaaacaagttaaattttccatggagagccacttataagataaaacagacaccatttttgaattattaaaatgagaaaacctctagcatcagaaaaatattaattgttgctaaaaaataaactgagaaaatgtcttcaggttttagaatatctgcagtataacacttttataaacatcataaagtgtaaataaatgcattttgttaagagagaaaaatatagtcctgcttttattcagtgttccagataatgtctggattatatttttctagtcacaaaattctacttactcctatagtgagcaaccagatgtcagtgtcagcaaccagacacagtagactatagaaatctaaaacagtggcataagaaatactgcaagagtgaatactcataccctatttatttttatgcttccacgactggtacagtgtctgttacacatcattacccaacgctcaatcaacatttgatggataagcaattgaattaaataataaattagaaatctcatgcattgatccatcaatgtataaaaaaatgttccactactgtattccaggccagcagccaggctctgtccatttatagtgtctgattcaaaagcaagtttcagtgctaagttttgacaacagaaatactgaattcactttcattttgtaaaaaaataataaaattcaaaggccgtcaaccatctgaatggacacatcctctcagccagggtgattccaaagttaatctgaaaaactaggtcaggccgtggtgggatggggcagtcagacatgcctcattatactctcttccctgttggaattactgatagaacaggctcctcaattccgatacgaaacactgacaatctgtttgcggaagcctgctacctggaggctttgtatgcatgataaaaacattggtctcttcaatactttcttctaacccagacattcctctctattgattccatgtctttagacaataacttaactcttgcaattaatttccaatatgaaaaaaaaaaaaaaaaaaaaaaaaacctggccaggcacggtagctcacgcctgtagtcccagcactttgggaggccgaggcaggaggatcgtgaggtcaagagatcgagaccatcctggctaacacggtgaaaccctgtctctactaaaaatacaaaaaaaattagccgggcgtggtggcgggcacctgtagtcccagctacttgggaggctgaggcaggagaatggcgtgaacccgggaggcggagcttgcggtgagccgagatcgcaccactgcactccagcgtgggtgacagagcgagactccgcctcaaaaaaacaaaacaacaacaataaaaaaacctttgattctacctatgacctggaagctcccacttccagttgtcccgcctttccagaccaaaccaatgtatatctgaagtgtattgattgatgtcttatgtctccctacaatgtgtaaaactaagttgtggctcaatcctcttgggcacttgttctcaggacctcctgagggctgcgtcatgggccactgatgactcgtatttggctcagaataaatctcttcaaatattttacacagtttgactcttttcattgacaatttcaataatggggtattgattctgttctttttggtcctctcactttttccttgatatgattctctatctaaatcaattgacttgaaactccattccacacttatagaacatgattttgaactgaaacggtacatcattcagttgaatggatgaaattcatcattgttggctattgtatccatatctaaggtttaaatttagtatgtcatcagtaaattagctgctatttagtattcaagtaagctatgaaacttactagtagagaaatacaaacacttccaaataaaaatgtatttccaattgaacagaaactatttcatgtctgtatccattgtctttgcatcggcatgggggtgtattttaatgtattgatataatgtagaataatattttctgttttattagtttttaaactgagtaacatagagaacatttttagaatacggaataggaatcatctatttctaaaagtatttttatttatcatgatattacttaagtacaaacagaactatatagaaatatttaggaaataaatactagtgtttagatattgaatattattgacatgtttatgagatctctatttacatagtcaaagtgtattcagttctagtttttaagaagtaatttctgagagcagtctacagaaatctgtttgaaaacacaacagaaaatagttcactattgtctgcaatcatttttgtcttttttaataagaaaattctgtatttaattccacattcactatccttaaagcaaacatgtgtgctgtttatagtacattaaaagtgacatttataaggaagaaaaactttccattttatcagggcagcccttcaacttttgactcagaatgccttgtccatcagctgagccgagagctcttacagtcaaagacacacgttgtatagccaccgtaaatgtgaagagtgagaaagggagtgattaaaaaaagtaaacatgtggacaaaagctttttgatgtttttctttaatgtccaggaatatttaaaataaatcaacatgtcttcttagggtcattattattaactgctactgctaattcttcttagaaggcacacattttccaacagaaggtgtccagataattgttccccaaagacacggttatcaatggaaatctatcaaataaatctgctaaagataaccacaatgaccagtcattgtcacacacggaaaatgcaaatgaaacactctggaaatggaacttagtctgcgcgactcttctatacgttttttctgttaaaagggcctgaaattatttttttcaattaactttggtatgaataatgcaaatgattatcgtgcagaaagatcaacgaaacattctacagtaatatatagttgtgagctgcctaacaacagctcaatgatacgactcatatacaacatcggtcccaggagatgatggcgtactgatgttgtagccgtcatgaggtcgtagtgccagctatgatgcacgtgtctgtggtgacgccggtgtgaacaaaccacctgtgcagccagtcatacaaatcttcagcacatacaattaggttcactgcatatgcttgatgataatagtgaacaactgtcactggtttttctacttactatactatactttttatcattatttcagagtgtgcttcttctactaaaaaaaaattacgattttactgtaaaacaaccttagtcaggtccttcaggaaggattccaaaaggaggcattattatcctaggagatgaaagctccatacctgtccttgccccgaagaccttctggtgggacaagacgtcaaggtggaagagatgaccccgtgcaggcctaggctagggtgtgtgtttgagtcttaatttttaatgaatacagtttaaaaagtaagaacatataaagaaattttaaatagacaaactcttatgaataacaatataaatgttttgcacaactgtgcaaggtttatgttttcagttaaatattattacggaagagtcaaatgcttaaaaatgaaaaagaagtttatgaagtaacgttatactaagcttaatttatgattaaaaaagaaaaatgtgtttttatacatttagtgtactctaagtgtacagtgtttatgaagtctacagtcgtacatagtcccgtccgaagccttcacagtcacccctcactcacacacagactcacccagagcaacttccagccccacaaactctattcacggtaagtgtcctatgagagtgtaacacttttttttatttttaatgctgttttattactgtaccttttctatgtttagagacacatatactgaccattatgttatagttgcctacagtattcagttcagccacatgctgtacaggtttgcactctaggagtactaggctacaccacacatcctaggtgcgtagtaggccgcaaaacttgggtttgtgtaagtgtgctctgtgatgtttgcacagggacaaaatcacctaaggatgcatttctcagaatgcatcccagttgttaagtcatgcatgactgcatgtaacatatctcaagatgctgttgttatggtcaagcctcccactttatcatctacagtatatttagtaaatttaaagagggacccctccaaaattgttaccatggtactgcgcaatggtattttccagcagtgtagaaatgtattgacttacatatttctgaaggaaaaatatcattaatgaatatgagtctccccaagaaggtgtctgaaaagaaatatttgtaaacacccatctcttcaaacttccaagagacagctactaccataaaattgaatatgaaaaatatttattctgttcaatttcatcaatttaggaaaggtatttttaatagggaaaaattaaggcagatgttagaagcagcggatgtcaaagaaaaaactagacatcaatggagagcatgcctgttcttttcatgaaattgcatttctcattgtatctgacgtaaaggatccttttgcagatgcagttgcaggcttttattttacaccaggtcctcaaatagcactgttggcagcaccactatttcattataacatggatgagaaaaataaatagattcctgaccagggccaccacctgttcttaccatctctgcatgaggtatgtccagtttcctccatatcccaaagatgaccatgtttgcatgttaggctcattggcatgtgccctggatcctagtatgggtgagtgtggggtgtgtgtgtgtgtgtgtgtgtgtgtgtgtgtgtgtgtgtgatcctgccatggtagtgtgtcctgtccagggctggtgaccacctggcacccggagctgctgagacagctctggccacccacaacccaaaactggaataattggataaattattttacttgtttttattaatctttcttaagtgaatgtagagctcacatgtgtgtcagtgttcaatattagaagtgttttgatctttaatatttagaattttgtagatgttttctatgacaagtaatatgacataggaactttacttttgtttatatcaattaacctgtgggaaaattggtcttgtcttacattgttttgcttagagccacattttcccagaacctaccaagcacttgaagtgagcacttgctgtaacagcaatggccatcagctccacgcaacagcccagtggcattatagagaataaagaggatgtctatttctggggcatcttagaccatttcaatggtttgcttttttgtcttctctacagatttttttctttaccttaacatcttgacacttaattttagaagaatttgaaaaacacaaatcagacatagcctttgcaaggtgccgtttttcaactgacagggattgcaatggaaaggagaatggactttaggtctcttatatttatcaggtgtgcttatctactgaaaatgttttcccatcagtattgattttaaaggggaaggtgtgaagattgaatgagataacaggtctccaaatatctgttctttatgactctatcagattttactgcaaacagccgttaatagttctgagggccttgaaccattccaggttggaattgaatctttttatgtttgtatataaatattaatatattataaagtagatcatatattctcgtatacatacgtacaataactgaaattcacgtagctcataagcttagtgggaataggaaaaaaagtttttcaaaattcagttggacaaaatgttattttagaaacaatgaatcaaaaaataatgtataattttagtcactttattcccacacttggtaaaaagtgtaaataagtatcagaggcttaaaattaattcaaaaagtttggaagtaaaataactcagcaaatgggaaaaaatgattagatctaccatttaaggtttaaagtcactgattggtgacacaaagttataaatttatgatttagggattggggatttttatcttcaacaaattttctttttaaaaagtttttgtaaaaattttaatgggaacaatgtgaataaatagaaataattaagaataaattagaatattttcttctagtttcaaacaccaaaaaacgcaaaacagacatagtattataaatccattagcaattttactaaaaaatcaaaaaaacttgtaaattgtaaaatattgatggaattgttgctaggtctatgcaaagattcaagacacacacagacacaaatattaccaaaatatggtaatttagtgttcgagaaaaactaatttgaaagcaaattatttcaacccaatgtcatttctgccaatttcattttaactgaattttaaccagtttgcctgaagattatgcatgtctctttgtgactcccagaagtaatgaatacacatgaagaatttagtaaatacctactgagttgacataaactctacttttaattctctttatttatttcctgagccatttacactccttcccatagatgcttcaagaaagcaatacttatttaggtgatgggaattctgcgcccaatgcagacatttggtaacgtgaaaggatttcttgaaagagctctgggcacagttgttttctctcatggcaggtttccactggaccccatgaagccaaatttgtacatcagggcttgaaacttgaaacataggctgccattctaaatatgcacacgaaaattccctccgtaacacttaatttggcaagtacatatggtcacaattcagtgacttaattgggctatcacatcaaacctttaacccagctgtttcaatggttaagtggatgtcatattaagtatctttccaaaagaaaagtgaaagcatgatactacaatacaatattaatattcattactacatgggacaaggctatcgaaaggaagtttaaaattcatcaaagcaacggcagcattttcaacagcatgtgtacaatcagtggaatttcatgaggtggattcatctggaatctaggtcccttagggtttctctccatttctctacactttgcctctgtagtagtctcctggtagcttaagaaaatataactccaaattccttcatgatgtgtactttctatgtaaaccaacgatatcaaatgtgtttgttttggactatttgctgctgaaagctcttcaccccactctctctcctggctttgggaaggattagaaaaatctggttatataattttcaggatcacattaaaaaatcggatttcctagtcttgaaaccttacatttcttctctttactggctctctgaatgcgagccaatctgtaaaaggagaaggtgctgacaaagcatttatgacaaaagcaatgaggacctcccaggaggtggcagtcattgaatgccttctactttcaaaaagtctcattctccaggatgaggaatgacagtgaaagagaaggacctcatgggacgtaatcagaactggctgagaataactcaatgaggaagtgagctgtaaatatacttgaaggtggaaaagggcaagatttggccaaataagaaagataaattgatgtgggggaagtcgttgtggcaagcatttatagaaaagtatatggcacagggagttacagtcatcagatctggcatcaaatagatttgggtttctgctccagaaagtgattttgtaatgttggacaaattacttagatcttagtttctacatcttagaaaggggaatgaaaagtaaagcttactcttgggtttattatagagaattgtaaaaagatatcacaaatcagggcactcggtacaggttaagtgccccatacatgtcaggactgttaaaattattttcccaattctaaagcaccatgcaaatgttagggaaataatacaattttcaaagtatacagagattttaacatatcgcaatttcagaaacaatatttttaaagggtatgagagtcaaggctattaatgaaatgctagcatagttgtaatggaagtgaaggagaaggacatcgtagtttttcatttagcaatagtaattccacttcattatttctgccttatcataataaccggaaatacttgcacaacacacactatgtgctagacactgttccaagtcgtttatatatattgagtatgtatcagtaagtactattattatgcccattttaaacaaacaaacacacaaacaaaaacatgctgcagggagatcaagtaatttccaggacaggtaactgttaagaactggtagtagagcttgcatatgatgatggattcagaatctctacttgcaagcatgacaaaaactctttcatatgaaaatgtggctaacatcagaagaggtgatgataaagtgtgattagatctacggtgttcacaatggaggttagttataataacatgcatatatggattggggagacttacgatgttttcttaggtagaatggagggcacaaccataacatagttttaaaaaacatgtttcaagctctcgaggcaaattcatataatagcaaaaacactgcaggagagactgcagcaaagtcaaaaacaaggtaagcgaccagttggcaaatggatttgaaacctagagactagattttcaaaagatttttaatagcacgtgaaagactttagcagctccggacaatcgaaaaaataaaaatgctgttgcaagataatgttcactatgtaaatggctcttgagaagcatcatgaatatttgctagtgtgaattattaaataatcttatggtcttacattttgacttcactagtgaatcctcacgtggtcctatattttcttttctttctttttttttttcctttttttttttttttttgagacggagtctcgctctgtcgcccaggctggagtgcagtggcgcgatctcggctcactgcaagctccgcctcccgggttcccgccattctcctgcctcagcctcccgagtagctgggactacaggcgcccgccaccacgcccggctaatttttttgtatttttggtagagacggggtttcaccgtgttagccaggatggtcacgatctcctgacctcgtgatccgcccgcctcggcctcccaaagtacggggattacatgcgtgagccaccgcgcctggccgggcctttgccattttaaacactagaagaattaatccatatataaattttcgcaaaactatgacaagaattgttaaatgcaaatcaagcttactactacgaaaaaagcaacttctttcgtgcctcaacctacatccagccttaaaaagtagtgtaaggatcaaactgttccacaaatagtcaaccaaaccccagtgaaagaatgttcaagaatatttatgggaatacaaaaatattcagcacctgtcaaagtgagattcacagtctctggcatccaatcaaaaagtaataagcacgcaaaaaagtaagaagatatccataagaagaagaaaactcaatcaatgaaaagtgagccagaaataaaacagaattttcaatcagtgaacaccaacattaaaactgttattagaactgtatgccctgttctcagtcaggtgatgatggaacatgttgtcttgagacatgggaaatattaaaaaacaaacaaacatacccacaaaaaaacaaaacaaacccagattgaacatctagagttaaaaccatctgagattcaaaaatcaatggatgttataaggtagaatagatatagcagaaggtaacattaatgaacatgtagagatagcaagataaagtatttaaaatgaaacataaaagaaaaaagaaagatttccaagcaaaaacaaagcaaaactaagagcacagagaatcaatgaactttgggacatctccaagcagacacaagtatgtaattaaactcactgaaggcagggaacacaaagagggacagaaaaaaagaagaaaaggaaacaaattacctaaaaacttcaaaatttactaaaacagtgaactcataaatacaaaaagttcagtaagtgtaaaatgcaaagaacatgaagagcaccatatcacacatgtcaaaatcaaggtgcctaaatacagcaatgaagaaaaaatctttaaagcatccctactagtgggggtaggagtaatgttctgtgtagagagacaaagataaaggggccaggtgatgcctcttcagaaagaatgaaaccaaggagagattcagcaacttataggaagtactgaaataacgaataagcaaaacaaccatcaatctaaataaatttatatgacaaaaatattttgcaatatcacagggtagagaaacaagttcagacatgtgaaaactgaaagcccgtcactagcaggcccataccacaaggaatattaaaatgagtcattccagcggaaggtaatagcatagtaaggaattccaagcaccaggaatgatacccgtatggggaattataaaatatattttattttaaaaatctgtttaaaacactattagctgtttaaagccaaataatatatattttaggtttctaacatatgtagaagtgacagaaatgacagcaataccacagaggctgggtaagaagaaaggagagcacattgctgtatcttcgctatacaataggtgaagtggtacaacatattaaaaaaaaaaaaaaaaaaaaaaaaaaagcaggctgggcacggtggctcatgcctataatcccagtactttgggaggctgaggtgggaagattatgagttcaggagttcaagaccagtctggccaagagagcaaaaacccacctctactaaatatgggaaaaaaaaaattagctgggtgtggtgacttgcacctgtagtcccagctacttgggaggttgaagcaggagaatcacttgaaccttggaggcacagggtgcagtgagcggaaattgcaccactgcacttccagcctgggtgagacagtgagactctgtctacaaaacaaaacaaaacaataaaaaaagcagcagtataacatcacagtagattatggtagactgctataaagtctaaagtcaccactaaaatagcaaagacaaatgttacagctattaggctagcataggagataaaacgaatcacagaaagtacccaatccaacaaaaggaaaacataaaaagaagaggaaaaaagaaaatgaatgagaaatacaaagcaaactgcaaggtggtaaaattaaatacagccacaccaataaacataggaagcgtaaatgacatgaacctcacacctgcaaggtgcacatcatgataatggatgaaaaatacacccagtgttatgttgtcttcaaaaaaaagtattttaaatacaaacagacaaatagataacagtaaaataatgagaaaagacaaatagctttatgtgtgctgctgtctggccgccttgagggggaaatcaatgtagaatagccaaactggaatttcaaaagacgaaatgcattttttaattctaggagtggtggttcctgggtgaaaccatacatttatttcagtgttctgaattacacattcaattaccttaaaataagatttattactaatagatactattgatatcttgctgagctctttcaaatgctggaacgctttatatatggtatttcaaaccttacacgtctccaaatgaggcatcattattccaatttcacatacaaaaatgatgagacacagagaggctaaggaactcagttaagataacacagataaacctgaatctgtatagacctatgatatttccaccacaccatattgtcccaattgtgttgatataattgaaatgcttttaaatgcaactgtaatgtcagaaagaaataattttggcaaagcttaattaaaaaaaaacgctgaataattaggagactggggttcctgtcttttcttgcccattgcttgtctctgtgatattatttgatatgatattttctggctcacatgttctcatcttaacagtaagaaagaagatgagagttggggtggactcattcattctaaaagttgagggatctgcacaataactgctgtttcaaatacaaataacttattttctcatacttccttattgcaaattaaaaaatataaaaatggcaaaggaaaaacagagaaatcatctctgaaaattgatgcaacacttaaaaataacacaatgcaattctgtttagtatttactgataagaaccttgtcttaataagctaaaggcaatctcagtctactttgtgtcattccaagctctaaaattctttaccataaaagctgcttaactcgatttaactggagggtcacatctcaggggaccagcgacccctccagagggaggaaggacagtcaggaggagcaggacacttcattccatctgtgattctaccacggcagagctcggtcaccggaaggataattaaatccgggtctcattttcttctctcgtgcaataagaagagacatagcgcaccctgtacgtgtaccaccctgggcgtgtaccaccctggccacctacaatcctggctgcgtacaaccctggatgcatagcaccctggacacgtaccaccctgggcatgtaccaccctggccacatagcaccctagccgtgtagcaccctgagggtgtaccaccctggatgtgaaccatcctcgatgagtagcaccccaggcttgtaccatgctggggactgcaccatcctgaactttgcagccctcaggcccagactgacttctcccacaaaaagttaaatttaaaaaaatgtccccatggcatctgagagtaattatattcaacatcttgttcacggaggagtttctacttcctgttttataattacaatgttatgcctgaatcttccagttttacaaagctgatttacaggaaagccttgtgcctgaggtatggtgtggaggccacagacggggcacagggagacactgaacatggcagtcaccacctgtgccctcccacctgcagcggccacgcagtcgtgggctggggtaccgggtgctgaggtactcatctctgaggaacccacaatgtgggcgacagttgtcccattaatgagcttaggagcagaagtgagacaaagcctctcatttctccccacatatactacaggaattctgtccttatagggttaggcaggtaaaaggaccatcaattgtgtatgatatgagcagacgaacggtttcaaggacactgtcatttaaaacagtgctacattaccgatcatcaatgacaagtggccacagcagtagaaatgactgctgagaacgtcggaagggccactggtgctggggtcagaacactgtccccagttgggggaagaccagatccagggacatcatggggccctgtgggcagcagatgctgttacagctcagaaagaggatgtgcaatgctttagaatgaaagaaactcaagaatgttcctgctattagctgcaacatagaaaaggggaaattagcttgacaagatggattgtagtagaaataattttaagtagagaacctaagagtcaaagcagtaaccataagattcaaagactaaaataaaacgtgtgaacaccagtgaactgtgaaacacaaagactaaattacacactttaaagctatttccagacattgtgagacatggcttctcagcatcttcatcatcccctttttctttcagactctggcactgcattattttttttttaattagagtttttatgtctatgctggtgaacacacacaggtattacatattttctggaaaaatacatctaagtcattcaaatcaaagtatattagattcctgtgaagtggatataattcaaaataatggttctacaattgtattcaaatataaaatttaggactcatgcagattagattttaaaatcagttctcccaatttatatacacacattatataacatataataatgtattctatagctcatatatatctgatatatatgtattatgtatcataaatttatatacacacacaatttatatgtgtatgtgtgcgtgtgtgtgtagaaaataataaaagcattttaacaatataaaggtcatgtggcattatcttttatttctaattattgaattcttggctgtttctcagtctaacttcagttatttctcttctttgtcctggaagttagcttctaaaaatagactcaatgttatcattataaacactttaatttacttggcattagtatattacaaatccatgattttcatattcattcaaacctaaatgtgctttctgttactgaattcacataaacagctcaagcttcatgaaaagagtctttcggaaaggataaagcatgttttgtggttgctgttgccttacacgtcatgtattcaactctgtacatagtataactgtgggcttccaggtatttttctttaatttctgaagacctactgttgattgttgagtcttgataattccatcataacaaacaacaagtgtgcagataggatatacactgggaatgtttatttccatttgattttaaaaggatgtagatattatttaaatgacctaatgatttaaactttttttctgtttcccccataacacacacacatattgtaattaatgcacagcctggggagcaagtgaactaacaattattgaactctaagcgccaggcacttcatgtattatttccctgaattcttccaggagccccacagagaatgtgacaatgaggccatctaaaaatgggcagagagaggcttatggccaagagggaacttgagtcctaactccacctttgtctcagatctcatgctcttttctttccagaaccctccctgatgcatgacttagccctatagggttgtgacatagagggaacacctggagtccaaatgaatacagaattaaatgtggtctttaaaaatggtctctatggcattgaagctgtggcttcaatggaagctgtggaagaagcagagcagcctgcaacggttccgtgagcctgacctatctgacctgtgctgggccagatgctctgtagtaactcatgtgtatttcagtctgactctagtgttcatcaaagtcatctaagtggtaggcacatgtattctggagtgggaggaagggaggaaggagagagacataaagtggaatattctgaaaacaaaatgatcttctacccaaagcccttgggaacggtcctgctcatggaataggaacaatcttggaaactcaggaaatattgcggaaaaaataaattgaaattaaaatggcatttttcccagggaattcttaagaatcattatagctaactcagattagtggtagcgtaaatgcagggaaggcaacattgtgatatgtcattcattcattcattcattcattccacaaatatttatagaatgcaaattatgttgaatatttactgaatgcgtattatgtgtggaatatttttccaggcactaggaatgcaatatcgccctcagtgagtatatttggggcatgcagagagaagaaacaccattaaaaaaataaaatttgtaatagctcagtggattttaaatgctatggagaaaaataaatcaagagaaaatggtatttttttgataggaataggtagagaatgcaattttacattaggtagtcaggaaacacctcaataagaaagtggcattgaaaaaaaatatgaagtagaggatcagatctaataataatatttacatcactgagcctttagtttgattttatgtagtattataaaaattaggattgttttcccaaaaatataatgtcatgttgagtccttaggccttgtttcttttcatcctgagagctttaagtctttgtatgagagatcaaaccgttttgcccactaaaatgacatgtagaattcattcttttccaaatattttgtgcattcctaattgataagtatctcagggtagaccccgactgatttctaaacatacttgcctaaggtgaaaagaatgaatgtacgcagtcagactttgttttggttgttggtgctgtatggatgttttcatattgaataacataccgttctttgttattagtcactgagattagaatgaaaagtgatacctacacatttttacactaattatgagcataagattgagctggttacacaaagaggggagtctttcatttattcaataacttattttaaccatattcttaataacaacagctaacacagacaatgcttcctagacaaaccactgtgtacatatttcaatttatgaacatgaactctcctattttcccaacaagattctgcagtagctactattatccccattttaaagatgaacaaactgaggcagaaaagttaaggaacatccctcaggtttataaaccaagtaaaagggagagccaggatttgacctgaggtggtgtggctccagagtttgtatacaaacagcacacaccaaacaggtaattcttaaataatttttgggtgtcaatctgacttccaaccacagaggaaagtgtgattggatcaatgtgcttcctgacacatttgggtgcatttattaatacatacatgtatatctatagaactatataaaatgcaaagctgtgtatatctgtgttacatgaatgttattatacagtatatgtagtcacaagctttattcactcaatagtacaccttagaagcctgtgttcaatacagatagatcaagctcatttttacagctgctacatacaaaaatagtctatttgctaatttttccaatttcaaatgctgcaaatatttctactataaatctatcgtataaatgtgtgtgaatttctctaaggttgatacaaagaggtgatgttaatgatcaccttttcaagactcaccacccatctcaacaactctcaaaacagtcctttcatggttaggaattgcctccatttttttctatcctgctctctccacattcttttatttttacagctattctttcttattcttctgttgaactttaattgtaacatcaaagagtctatcttaggtgttgcgtctttctctatctattctgataccatatgtagacttctcaaccttgacatcactggcattttgtatgaaataattatttgctgtggagattgtctggctgtaggacattttgcaacatctctggcctctatctactagatgccatagcactccaagctcctagagttctaacaatcaaaaatctctgcagacattgccaaacgtcatctgcggagaaaaattacccccagctcaaaaaactactgcctacgagatgtcacccagtccctggcattcaaataccatgcatatttgaatcccctttttgaataagattggaatctacactttggtctctagggccaacctcttacctgacttctagatttttatacccaactactacctgctctgtcttttttatttagggtttaatatttcattgctctgtaagttgcataaaataacattatatttactaatcgacaagcataggtatagatatttttatgaattcttaataaattttcaaatttagactactttaaaaatttgttttaaagtttaaaaatagtagagaatctccataaatggccacagcccgttttccttactgttagcatcttagctttgtatggacatttcttacaatcagtgaccaatattggcatattcttcttcactaaagtcttattgaattatcttagcttttaagtaacgttcgctttctgtttcaggaatccattcggataccacactgcgtttacgtgccgttcctctttaggtgtctcctggctggggcagcttctcggacctcccttgttttaagggccttgatggttttcagaagttgcggccagatattctgtggaatgtccctcctgtggaacttgtctggtgttttctcacagtgcaccaggttgtgggttgttgggaagatcacagaggtaaagaacacttctcgtcgcagcatgccagggacacgcatcatcagtgggacttccactctggatgttgacttgatcacttggctagggtcgtgtttgtcagtttctccactataaacttctgtatttttacttccttgcagcctatactctttggaagggaggaactatgagcagcagaacttaaggaatacgaaaggaggctagttatacacagagcacccactaaagtaattaatcaagagcagagaatctacaaacttttttaatttttaatttttaaaattttatttaatttttgttttttgcatatatacatacttatggggtacatattttgatacaggcatacgatgaattttaattgcatcagggtaaatgggggtatgtatcatcctggaggggtaaatctttaagcatttattcttcatgttacaaacaatctaatcatactactttatttcaaaatatacaattaaattattgcttacaagagtcatcctgcggtgctatcaaatactagatcttattcgttctctttttttggacccattacacatccccacttccatccaagccccaacctcaaaaactatttagtgagtaaatgaattaagtcactaaactataaatgccctaattgaccaagtgtataaaattcagagtccctgaaacggtgaatttaccatctttatctcaagtgccaatttttaaaattttagagaagattctggatctgaaagggcacttctaatactcccagattaaaaataagcctacctttacgtgagtcttgaagtgacctatattcccatccatgataaggtctcacttggttggagaaaggctgcagatggaggaggagtgacatgccctacttttaaggaggaaggagccagaaaacccaccccaacatgatgcctgaaatcctctctggctttgttttgaagcgcactgccctgagttacagcatctttattgaaagggagaaccaggaaaaagaaaagaaaagaaaagaaaaaagaccaggagtagaaagcagaaatggcagcacaatccctgctgagaatctctgctgagagcacagcctcccagggaccaggcctgtgggaacaatgccaagcttcctggatttcttcaacagttttacaaagcctgcacaaaagctcatctaagttttgaagactcaaaaaaaaaaaaaagatatgtacaagtaaagccagactcggcagcttctttcactgttggcatgatcccggagggctgatccaacccagtagcataatgtagttaaatcagaccgcaaggttgaaaacgctttggcagaattcaaagcgccctacacgtataaattgaatgcaccattgttgttattctgtatttccatgacctagcacaaaatgcaacttcgaatcagcagagaaaagcaactccaacaatcaagcaaacctctgtcaacgtcctcagaagtgctaagtgcacagcggggcttgtaggtttctgtggggccctagaaaactatgataaaatggtgagcaggataaattttctgtactgatcaaggccaatttattttccaaaaatcaacagagaaggcaagcagggattaaagaaaggcaaagaaacaccactgctggttttggtagggctcccagtgtcccaggtgtgatggacaccatacaatactgacagttttcttctctttcttctctttcttttctttcttttcttttctctttctttctttccttcctcctttcttccttccttccttccttccttccttccttcctttctttctttttctttctttctttctttcttgacagagtttcactcttgttgcccaggctggagtgcaacagtgttatctcggctcactgcaacctctgtctccctgtcatatacaggttcaagggattatcctgcctcagcctcccaagtagccgggactaaatacccagctaatttctgtatttttaaaaatagagacagggtttcaccatgttggtcagggtggtctcgaactcctgacctgaagtgatccacccaccttggcctccgaaagtgctggggttacaggcatgagccaccgtgcccacccagtactgcaggatttctgagagggtgggagtccagacagggcacagcctgccatttggcaaaagattagagaagaacgctgacatttaatgcgtaattatcatatgcacaaggagtataatgataacactcacgtgtatgctattttcatataatataattggcaaagacctatttctccaagttccatattggagatcccaaatatcttgtagtgaggggtgattttgcccactgcaagatggataatctttacccagggtcagagtgcagtgggagatcagcatctccaaatttagtttgctagaacgtcaatgcaccaaatttgaggaagcaagctgagaaaatcacgaaattcttgcctttccctccatataatttaagtatttagaccagtatttcaacctaggcatctcctttggaaaagaattctgatagaaggaatcatcccataataagtaaggtgtatatatttgctattaatgttataaatatttagctcatcaccacatgataaaagaacaagttttaaaaaaaaatgggatatctgaggacacatcctggaacccacttccagatactctaactgtgcagatttggggcagggcctaggtaaacccctctccatctctcataccacaatgattccaatgcagtagtccatagaccacaatgccagacgtactgaactaggcgcagagagaagtggctaatgagggtctgagaggtataaatggacccagaacctgagggcccccttactctcagctaaagaagtggccttatactttagcaaagggtaacaattggtacctctaaccagaggagtccttgggaggctgtgtgctgaaaggatgattggaataagaaggggctgatacgaggaccccttgcccaggaagcttctccatgggtgcagtgtacagttagtgaaatctgaactacaggtgcaaatttgaagcctgaaaatataacacgttattaaaaagtcactaacaacagcaccgtgtgtttagaacttagactaccaagatttattcaaagaaaagtattttatcactgacagtgcttagcattgcgaatgcatgagaataataaaaatcagactgacctttagttagttttactattattctaaattctctacagacagtgtgtgcgctgactgcctctaccttggtgtgaatagctcccaccacctgctttttatcatggtctcggtggggaaccctactgaagttcaaggttttggccaacgcaatatattcttaaaacaccatcgcaatcaaaatatgaaacacttttgttatctcaagtggttttctctgaccttgcaagctggtcctcaatttccactcctgctcttagcaacctctgatctcctttctattactacagatttcatttgtcttgcatagagtgtcatatacatagaaacataccccaaaaatagcaggttaaaatcaaacagctcatcatggcagtaggaggaaaatgctccagaactggcttcttgaatttcctctggatatgatggcatttgggggcttagattagagaataaaccagtatgtttaaatgcctaaagctttacaaaaatgttcagtagcttttactagtaggttggtttatatattgactatacatgaaattagttgctataattatcataaataataattaagggaaaataaaaatgtatttacttaacacatatctgtgcattctttattaccgtgcattcaaaagtatataaggaagttaagaacctgagatgtaattgttttccccaacatggccacagctttgcttaggaagttcactgagagccaaatgctactcctatctctctctgtcgcagttcactacaccagctgctaatggtctctaagcagccattctccacttttttctatgtaagtacagaactcctcattaccaccatcaagatttcacagaacgcacggccatgagaagaaatgatttggcgccacctctcttgtagctgaacatggacaaatgacgactttgagagttaagaggtgacggggaagtgaagatgtggcttccacttcacattctctcctctcctctggggagctggggtaggaatgtgtggtttgatctatctctgttgccttcatcccatataggggatggccgcccgagccatctaccctagctaggcacccatcatacccctaaactcttgtatgggagagaagcaaacttcttcttagcaagaacgactgcattttggaagcttttgtcatgtcggtttcgtctacaccctacctcatccaattatcaaacatgcctgagatgtccctcttgcggagttcaaccctcttggtggtgtagtctaattgtggaggtgtatttagcttatttccccatcggactgtaaaacacataggtaatgaacaggtccttgcacagtgtctcataggacattagctgaatacatgtgaattcctgagggtgcccagaggaaaataaacatttggacattttgtgatgtgtcattctctgggggttgatgatgacatctaccttcaagtggacgaacaacaatggaaacagaagctccttccccatctatctagccacagcagcccactgtttggagagaatgtattgaaatgttctgtgacatacaaaggctacgtctgcctgtgccctgagctctggggtttctcttttaaatcaataaagtacaaagagacatcaaaagttttcacttacactgcttttaacagcatacaaagaatgtcatataaatgtgtgtgaagaaggcgcctatttcacaaacttacatgaatatactatattcaaacaatcagagagaatactcatgagattattagtaacacattttctttgagctttgtgtagtagatgatagaaatatggcctacttcagaaactgtttgaaatatgaatttctcatacgcagtcaagttaaaacttcaattttcttattcaatttttaaaaaccattttgagacaataggattacttgcctcaaatgaattcaggttaaacaatttttgtattattgtttttctctagaaagattccaatgtctccttctctaataaatttttatagattacaaaaatatcctttttataattattgtaaatttcacaaacttactaagtgattaatccaatacatattttaaactcactaaacattccaaaatcagatcagcattttgaagagaaaaatttaataaattatatgaaatacatatgtaaagcatttcatataaataagagtcaaaatcagctcaaatttaataatgtcaagaattttaatgaatatcatataaagaagaagagtcaaaatcagctaagatttaataacgttaagaattttaatgaatataaaatattaatggaaaatattaaaacagaaactgtttaatgtaattataaatgccaccaaagtaacaatatactttgaaaaatcaccatgtattaattacaaataaaaacttgctgtcatccacaacagaatgacttgactagatactgtataaacaaacaagactcttcagcacttcaaatgactaacactgaagcagaagtgttgattttacagttgattttcttttttactatgccagcttatttaaacataccaaaatagcacttacatacaaatgatgagtcattagtatttaagcttttaaacaaaaatatgtaaattacacttaaaatgaaacacaccctacctgagttttcccctactagaaggctctgttatggaaaattgtagtctacacagatttcctcctgggaaaattgaactcaaccctgaatctctgtttggatattggtggcttcctttttttttttttttttttttgagacagagtctcactttgtcacccaagctgcaatacagtggcaccatcttggcttactccaacctctgcctcttgggttcgagcaattctcttgcctcagcctcccgagtagctgggattacaggtgtgtactcccactcctggctaatttttgtattttttagtagagatggagtttcaccatgttggcctggctcgtctcaaactcctgaccttaggtgatccacccgcgtcagcctcccaaagtgctgggattataggcatgagccaccatgcccagccatattggtgaatttcttttttttttcttttttttttgtttgtgccaaactaacattaaaatttatttatgatattaaaatacacaaatagtttccggggctgagagtcctgaaaaatattgggctactaaggaaagcatttaatttcaattttattattattattattatagtttaagttttagggtacatgtgcacaatgtgcaggtaagttacctatgtatacatgtgccatgctggggtcctgcacccattaactcatcatttagcattaggtatatctcctcatgctatccctccccactccccccaccccacaacaggccctggtgtgtgatgtaccccttcctgtgtccatgcgttctcattgttcaattcccacctatgagtgagaacatgcggtgtttcgttttttgtccttgtgatagtttactgagaatgatgatttccaatttcatccatgtccctacaaaggacatgaagtcatcattttttatggctgcatagtattccatagagtatatgtgccacactttcttaatccagtttatcactgttggacatttgggttggttccaagtctttgctattgtgaatactgctgcaataaacatacgtgtgcatgtgtctttatagcagcatgatttatagtcctttgggtatgtacccagtaatgggatgcctgggtcaaatggtatttgtagttctagatccctgaggaatcgccacactgacttccacaagggttgaactagtttacagtcccaccaacagtgtagtgttcctatttctccacatcctctccagcacctgttgtttcctgactttttaatgattgccattctaactggtgtgagatggtatctcattgtggttttgatttgcatttctctgatggccagtgatggtgagcattttttcatgtgctttttggctgcataaatgtcttcttttgagaagtgtctgttcatgtccttcgcctactttttgatggggttatttgtttttttcttgtaaatttgtttgagttcattgtagattctggatgttagccctttgtcagatgagtaggttgtgaaaattttcacccattttgtaggttgcctgttcattctgacggtagtttgttttgctgtgcagaagctctttagtttaattagatcccatttgtcaattttggcttttgttgccattgcttttggtgttatagacatgaagtccttgcccatgcctatgtcctgaatggtaatgcctaggttttcttctagggtttttatagttttaggtgtaacgtttaagtctttaatctatcttgaattgatttctgtacaaggtgtaaggaagggatccagtttcagctttctacatatggctagccagttttcccagcaccatttaataaatagggactcctttccccattgcttgtttttgtcaggtttgtcaaagatcagatagttgtagatatgcagcattatttctgcaggctgtgttctgttccattgatctatatctctgttttggtaccagtaccatgctgttttggttcctgtagccttgtagcatagtttgaagtcaggtagggtgatgcctccagctttgttcttttgccttaggattgacttggcaatgtgggctcttttttggttccatatgaattttaaagtagttttttccaattctgtgaaggaactcattggtagcttgatggggatggcattgaatctataaattaccttgggcagcatggccattttcacgatattgactcttcctacccatgagcatggaatgttcttccatttctttgtatcctcttttatttcattgagcagtggtttgtagttctccttgaagaggtccttcacatcccttgtaagttggattcctaggtattttattctctttgaagcaactgtgaatgggagttcactcacgatttggctctctgtttgcctgttattggtatataagaatgcttgtgatttttgtccattgattttgtatcctcagactttgctgaagatgcttatcagcttaaggagattttcggctgggacaatggggttttccagatacacaatcacgtcatctgcaaacagggacaatttgccttcctcttttcctaactgaataccctttatttccttctcctgcctaattgccctggccagaacttccaacatataggctcaaaataaaaggatggaggaagatctaccaagcaaatggaaaacaaaaaaaggcaggggttgcaatcctagtctctgataaaacagactttaaaccaacaaagatcaaaagagacaaagaaggccattacataatagtaaagggatcaattcaacaagaagagctaactatcctaaatatatatgcacccaatacaggagcacccagattcataaagcaagtcctgagtgacctacaaagagacttagactcccacacaataataatgggagactttaacacaccactgtcaacattagacagatcaacgagagagaaagttaacaaggatacccaggaattgaactcagctctgcaccaagcgggcctaacagacatctacagaactctccaccccaaatcaacacaacacaaattcttttcagaaccacaccacacctattccaaaattgaccatacagttggaagtaaagctctcctcagcaaatgtaaaagaacagaaattataacaaactgtctctcagaccacagtgcaatcaaactagaactcaggattaagaaactcactcagaaccgcttaactacacagaaactgaacaacctgctgctgaatgactactgggtacataacgaaatgaaggcagaaataaagatgttctttgaaaccaaagagaagaaagacacaacataccagaatctctgggacacattcaaaacactgtgtagagtgaaatttatagcactaaatgtccacaagagaaagtaggaaagatccaaaatggacaccctaacatcacaattaaaagaactagaaaagcaagagcaaacacattcaaaagctagcagaaggcaagaaataactaaaatcagagcagaactgaaggaaatagagatgcaaataacccttcaaaaaattaatgaatccaggagctggttttttgaaaggatcaacaaaattgatagactgctagcaagactaataaagaaaaaaagagagaagaatcaaatagatgcaataaaaaatgataaaggggatatcaccaccgatcccacagaaatacaaactgccatcagagaatactacaaacacctctacgcaaataaactagaaaatctagaagaaatggataatttcctcgacacctacactctcccaagactaaaccaggaagaagttgaatctctgaatagaccaataacaggagctgcaattgtggcaataatcaatagcttaccaaccaaaaagagtccaggaccagatggattcacagccgaatattaccagaggtacaaggaggaactggtaccattccttctgaaactattccaatcaatagaaaaagagggaatcctccctaactcatttcatgaggccagcatcatcctgataccaaagccgggcagagacacagccaaaaaagagaattttagaccaatatccttgatgaagtttgatgcaaaaatcctcaataaaatactggcaaaccgaatccagcagcacaccaaaaagcctatccaccatgatcaagtgggcttcatccctgggatgcaaggctggttcaacatatacaaatcaataaatgtaatccagcatataaacagaaccaaagacaaaaaccacatgattatttcaatagatgcagaaaaggcctttgacaaaattcaacaacccttcatgctaaaaactctcaataaattaggtattgatgggacgtatctcagaataataagagttatctatgacaaacccacagccgatatcatactgaatgggccaaaactggaagcattccctttgcaaactggcacaagacagggatgccctctctcaccactcctattcaacatagtgttggaagttctggccatattggtgaatttctaatgatgcttgttattatttgagaaggaaggagctgaggttttagaatagaaaaacaaaggggatgtcggagaaggagtgtggcctctgcaatggttaacagtgcgaatgagttccaggggaaggtcattctgggtttcggaactgtcccagccaccttagcgatggggctactggaggaggatctgcaaaggagaagcggcacctggcatgaacatagataaggcctgagaaatgcctgctcctccacatgggaattttaataagatgtgctcaaagcatcacagctattcatgttattctacctatgtgggaccacacaggaccctgagattaaaaaaaggtaggaatggggcaaggactaaaatcagaaatgcattaatcatgtaaggttagatgaccagacaggaagaaaacaaaggcaaaaaataaaactcccactaagcctgtttcccatttgcagtagaagaaaccaacatagaagcttctcattgaaagtgtggaggaaagagataagacaagctgcttgtgagcaagcaaagcaaaaaagagaattaatttcacaatacccattgtgattaatttatgatgtacaaaatgccatctacatttaatttgtttgttgtattatttttgttgatatcttatggagaatataaagatgggctccagcaggctcatctcatccccatccttgccccttacgatggaaaatccctcagctgcagttctaacatgagcccttttaggaacccagccctgctgattagagaggaaagaggagctgttctaagttagacacaggcatggaatattgacttcacagagaggtacatcttatcatacaagaatttctttaacaaggaaccactaaaaattcagagacaaagaaaagtagaagtaaaaattaaaaaatgaaatgaagtaagtgcacaacagattaaatcagcttcctagcactcttccaacctgtgaaacttttatagctccctgaaaatggataagaaaccaaagaggtggcaaaaggagtttaaataaaaactgtaaagtaagtagggaatgtgggagaagctgcagtgaagaaagcctacagaataataaccctcatgctcttgactatggtaaggaagttgtctggttccagacactaggacctgtttaccagacagattctgcaagggaggatggactgtgtggaaagactgtttcgtgatggtgtgaaatatcttttatgatttttcaagtatcttacatttattccttaccaaattaattattctaatgagtgagtcacctctctgcatgttcagtacctaaaaaggagttctccatttgcagttgattatttattttaaatgatgcttcactttagaagaaatatacactgtatagatgtaggtcagtctttccatgacttgacaacttctgagcatactggtaaagtgaataaataaatcaattatgcattactgactaacgaaagattcttcatcagcattatcttagtcaggggatgccaaaccccctgctgccctgtctgagaggtcaaggtgtagtggggaggagagcacgcaggtggtgaaaatgcagagtgccagctgccgtggtggagccaggtgccaggagaatggcaaagcatcacagagaatgcatggagggtcagcagagggtcagtggaggctcatgatatgcactgataccagaaacacgcaagacttgccaagtgacgggagtgaggaaaggcattccaagctacgggccaggttcacacaagtctaatttcctcagagtcatcatgtcataaatgctgcaataaaaccaaagttggcagaatagagcatgtcaactggggacttctaaataatatggtccagggtggagagtggcagaagaattttcatttgacaatggctttttctcaagcaataagagggcaatgagaccaatcggttgtacatacgtattctagaaattttctaagaatctcagatatctgacacaatgtcagaatcaaatgcactacaaataaataaacaataaccattctaagtggggaaatgtattttaaatcacctgtggcattgacatgaacaacatttcgtgaaacatatcctataaaagttttcagtgatacgtcccagatctgatcttaaagctggaaaaacagcacttattagatttcaattcagtagtcacgtgcagaaacacagattccttgtgcaagacccatgatggcaaagccacactgtcattattcctgatcagcattatcaaattcaaaaaaaaaaaaaggcaggttctgcatgctcagtaaaatctgattgttcaaacccagtatctgtcagcatcacggatgtctgactttaggtctttgtgtgtcaaaaccctaccagccaagagaaatgaaagcctgtacgtaatactgaagagtaaactgcagcaatattactgatcattgcaaaaaaaaaaaattcttctatataaaaagctgttaacaacatcatccagataaaggaataaggaaataggtaatccagacacttattaagagatactgttagttacataatttaggaagaaacgttggctaatagggataaatatatgagagagaagaaaaacgttctaatgtttgatagcactgtaagttgactatagctaataatttattgtgtatttcaaaatgcctagaagatttggaaatgataaatgttgacagtaatggatatcataattatcctgatttgatcatgagactttgtgtgcatatttcaaaatatcacatgtatcccataaatatgtacagttattacatagaacaaaaaaaccaaaaaagaaaaattagttacaatgtaaaaaataatttaaagataaaataaaaattatgtttaaagaaaatgtgtatgaaaaatttaaatatcagacaagtaaactatatagattatagtatatatttaaattatgattattaaatgaatacaatgtccttagaacaatgcctggcatataccatgtcttatatgcgtctattaaataaaacaaaacagaactattctgtgtgccacagttttaataccaagaaaaatactccttaagaaccagccattaatttaagcaatattccttggcactgacaaggtgccacgtacgtttccagttcagcggcttccagcagtggacacatcaggtgctgcctccctgaggggcattctaccaggaaggataagcatggaccaggcatgctacctaagtaaggagtccactgccttagaaatgggaagtgccttttattttgaatctaaatttcatatctacttcttcattcagttccacttaaacctgcatctatctgagagcactttgaatgtggtaagaaggaaccaggagtagactatgactttgtcacatcagcattttacacgtagctgaaatatcaaatcgtgcacaatgatgtaggtgataaatcatctttcatccagatttcattaaatcataaaatattaaacaaaaagagagtgtgtgttgggaaaatggggaaatgagtgtacctaaagaagcctcagatgctcaactgacaccagctgagagtgagggctcctgagaagtgcgcagtgtgaagcccatgtgaaatgcgaatctactctcctgcagcaaagggtcctagaaaattgtttctgcctctgatgtaaagttcaaaagtttgactatgaaaagtgcaaactaaagacattaggagctttcaccatggctcagatttgtttctgcatcccagtggtcattcgctgatggaaatacttgacgtcagtcttcccttttttatcgtaccatattttatatcctgcaatgttcctgggctccatatggtgtttcatagtcacctgctctctttcacaaattgtatctctgtttagggttttctgcagttgttttctccctcaatgttgagaaggtagagaataagtaagcttctgcgggctttgcccaagttttaaattttcatatatcaaaactgtagctgtctagagctgcatgtgcctgcaaatgtgaggcagggataacatccaagtgaagccacccatgaggggtgcatcgatgtcaacacacagctcctacttccaccctgtcatacaactgccgtttccgaacgtggcaaggctcccaacacctgtgccttcacatacatggtttctatggcaggtacactctgtattctcccctccaacactgctgctgccctggcgtgttggtcacccccagtatccgtactcaaccttcacaaccgagatctctcagtactgctgtggaaacaatccagtccatttagaaacagccttcctgtactcccggtgatcttgttatttatatctatatcatgtcaataatgtgatgtaagtgtactgtgtttgtaatgtgtgtatctacatgggtttcctcacaaagtggtcaattccattgagaataggacctaggcttaaaaaaaaaaaccttacctctagatttaacgctgtgcattcactaacttttgtgtcagttttcatcaaatccacttaagttgttcatttttaaaaaaaatctgaaatgattaaaatgtgctaaaaattactgattataattttaccgaatataaaaattgtgaagatttaaaaatgtcattttctagtttatgtttttagagttttttaaaaattacattttactgacactatttacacaaaacacttctgatacaaaccattcataacttcttatgaaagaaaatagtcctaaacacataaacaattacagtgcagttaacatttcaagaaccactgactctgttgggcagtgcttccccatccccctcagtagcacactgaacttttacatttaaccagaataaggctggtgttcaccaaagtcatggatagttagtaaaagtttatggtcctacagtcttaaaaatttttcattttgtaaaacttctagagaataattgaatcaatataataggaaatttggcttttcttttactgaatgtacattagctaatacaaaggtcatgacactgattcaaagtgaagttacggtatcaagaaactgtatgtttcttgatagtagctaatcttttttcactgctaaaagatgtattcttgctcaaatgctatgtaaaggagactcatgaatgaagctcatgcaccaaggccaggcaatgccttttagccatgacactaccaacttctggaagatcaaaagtaggaacaccacatgtatctgtgctaggttatgtaaacataggctctatcaccaaacacataaatgctaaatatttggggaactacagcaaataagaattccagaaaataactgtactgcttgaggagttttctttttttggaatatattttaaaacacacacacccaaagttttccttcactgtcttccataagaaagactgctcaaagaagaacaaagtggcccagggaaaaatgagagttagagaaaactgacaaatcattgatgttcgtccaatttgggtgaaaaataaaataggggaaggagacccttctccacgaatatccttggaggaagtcagaaggagccctaagaaaggaatgggaaagcctggaataggtggctcatttacaaaacaatgaaaacagttctgagcttcccctcctgagcctttgttcaagctcttttctctgtttggaagactcacccattatttctaaagattcacattcacctctccttagggactgtttcaactgccagtcatgggcaacgcctccttccttctttgtctcctgttcccactgcacctctgaggtatcccttctttctctgtacgaccttaaccgtttatgtctggctcttaaaggtgttctgctgcctagcccgttctgtcattgtatgtgtgtatttctaagtcccactcagcgcagggatgtttggcatgtcctcttaattttacagaacaccacagagtgccttgcacatgctagctacccgataatattttccaaataaatgatgtaagcattaattaatctattgacttgatagaaaacaatttgtattatttctaaatgtatctacctgaaattttaccattaaagacttgttacatgatgtggtaattgtagttcacgtgattatacccagaagggaaatgtaccacattactaaccactaacagctctttgtggatgtttttgctcatcaaaccaagaacatttctattctatccaacctgaaattagatgatagtatattttgtttgggacgagagtgaagactgagatgcaatccaaaccacaagcaaatacggaaaggggcgagaaacgaatgcaagctctgcctgtgctccaaaagcgaaagcgacaacacccactcacaaacacacacagtagccttgatcactgctgatttaacacagcctcacagaacaaacgtaactataacattatgctttaagtaaagtgacaaatgctatttgtattgtgtaaataccctcagggtggaacctaatgagtatattctaaagcaactccacaactgagaaacaagacaacatgagctcttagttttgtgtatgatgaaaatcaagtgttgccacatggcgaagactgaaattcagacacagagaagggtacaaggctctttttcctcaaatgtgtttccacagagtcacttcatgcaaaaccaaagggaaagcaaggatgaaagatactgggtgaaaggctatcctccgtctttgcatctattttatcatcttttttctacatgaagtcagatgttcaagacagataattatgaaaactaagaatcatagccgagatagaattttttcaaatctccgccatactaaattttcgttaagtaacgttttcaagtaaggtataattcagggaattttaaagtgattcgggagttaaactggattttggtagaaaaacagtatttcctagactaatgaatatttcccagagaatttattattgttatacagtggtatatcagttcttttcacatgaaataaattacttttttttttaatttcaaaatttttaaatgcatttaacttaattttgttgtatagctttacatgtacctaaagccagaataagtttcaacaacagcatttttgtttattaattatcaattcttttattcatccaaaatgaccctacataaactgatttcattcaaaaagaataaaatgcagtctcaccacctaacttgtcctgtggaatattaaactttccatgttagatagtgtaatttgataaaggaacgtgttattctttggacaactaattgtatgaacgttttcctgtaaacagaattactaaaatggggccagatacagtggctcatgtctgtgatcccaacactttgggaggccgaggtgggcggatcatgaggtcaagagatggagaccatcctggccaacatgatgaaaccccaactctactaaaaatgcaaaaattaactgggcatggtggtgcgctcctgtaatcccagctacttgggaggctgagaaaggagaatcacctgaaccctgagtgggggcgaaggttgcagtgagccgagatcatgccactgcactccagcctggcgacagagggagacaacgtctcaaaaaagaaaaaaagaaaaaaagggacacaacagtgagtgtcttcttgcagagccacacagaagggtctatagagagtcatttagggttttcttaggaaaggggtggcagaagggcagaaaaatcttccgtgcagtgttaaaagcagaagaaaatgaggagaacccctcaaaggttgccctcctcggagagttgagaagtctactttgtagctggaggacagtgtattgcgggagagctgtgaggccagcatgagagtggggctcaaagcagagaggggatcttatttgtcagccatgggagtgtgacttttatttcacactggggagagacatgaaaagcacggttacagaaaattaaatgtatatttttagaaagaagtctttcatgacaccataacacatagcatcattacagaaacaaaacaggtttagtttttacgacacaaaatgcagaaacataaaatgtatcctctggaggccactggaccttctcaaatgaggtgtttgtaatgattgcagaaaacatatctagttcatataatgttaccatatcagtggaactgtgagtttaagataaaaaaaatggaaaagataaaactattattctcatttcaagatatctagtggggaaaaaagaaataactatgcctgcgctgtgtatttctgtaccataaaataatgattttctgaacagattagaatattacataataaaactactgacatgaattcatggtatcagtgacattcatgtactgtatcaaaatgcagctccaccatctagttaggcactgcattatgtatgtaaaaatatggttataataaccaaataataattataattttgtggagaaattcttagcaaaatttacaatttaagttttctcctttgttcaaacgttgaatggcttggaaagataacccagtagttgatttttactttgcttatgttttattctttccttctatagactatttactccttcttaaaacaattttattagactttgtcatggactccattttgatttcctgaagggaaatactacaatattgttcataggagactggttgcaaatatatactatgatgggtaggcataaaaccacatactctgattgaggcgtgaatgtaaaattgtcatacagatgagaaaatcaaaaattttggtaaagattactgtgaattctttgtctagtaggaggtcattattttttgaccatttttaaaaactgaaagtcaacaaaattccaactcttatctacaggtagttgaaccactggtgatttttactttatgctttcgtctgttttctgagttttccgagttttccatgagcatctatgatattcaccgtaaaggaaatacagttttgtctttcgcaggatattatctctaggtaagtaaatgtgcagacagcctgacatttgctaatgatcgatgatttgttcttaccaccctccctctccgcctcccattcacaggcatccatgcagatgtatcttgggccagtggccacagcgtaataccatctggcctgtattcccctcaagcctctgcagcttcctgggccatggctcctgtttctccgactggattgcattctcatgttatacttccctttctttctcccactaaactctaggcaccttgagtttaggaatgctgtctacttcacctttatcttccaaactcctgttttggtgttaaacacgtaattactcgacaactcactactgaaagaatatcgaaatgaagacttctacaaaagtcttctatccggtactgcaacagtaaggtgttttgttttgttttgttttgtttttgttttttaccactttgtataaaattgcagtattattttttctgtttgtcttctctacttttgtttttctgttctttcctgccttcctttagaatgttcaatgttcttaagaattttttttaattaacttattggtgttttaactatacttttcgcagtgttttagtgtttgctcttggaattaaagaaacacccaagatttttcagtcttcttgtaaatattacaccaattttattttttttaaaatgtataaagaatgcaattttagaggtgcatttaccaaacctctttttttctgtgtttcttgtcttttctttttggtatgcttatcatatatattacaaacatgcaattcaaactctaaaacataatgttgttatttttacttaaaaagtctcatgcactttaaagaaactcagagaaaatgtcttcttatattaaccaaaatatttaccacctataatgttttgagacagagtctcgctgtgtcgcccaggctggagtgcagtggtgggatctcggctcactgcaagctccgcctcccgggttcacaccattctcccacctcagcctcccgagtagctgggactacaggcgcccgccaccacggccggctatttttttgtatttttagtagagacggggtttcaccgtgttagccaggatggtctcgttctcctgacctcgtgatccacccacctcggcctcccaaagtgctgggattacaggcgtgagccaccgtgcccggccaccacctataacactctctattcgtcactgaagatccaagttttcaccacaggttgtttccatgaagcccgagcaaccatctcagcatttcctccaccacgagcctgtcactgacaccctctcataagctgtcatagcttcctctgattttctgactcaccctcattcttgaaggttgttttcacgtgatataaatgtctaggttgacagttcctttttgctttgtttactttctttttgcttttagcactttaatgatgttgttttctatggatggcctccatggtgtttgatgtaaaatcagcaataatttaaattgttgtttcctgtatgtaatgcgtccattttctgtggctgctttcaagctttttctctgtctcttttgaagcagtttggctgtggtgtacatggttatggtttctttgcagttatctttcagtttacagagactcttgagtctttttttttcttttttttccaaatttggagaatgtcatccattagtacattaaagatagtttctcccttattctccctctctttctccttccggagtttcagctaaacgtctgttaggcctgatattgtcccaaagaagcctgacgccctgcttgttatattttttcagtcttattttctctatattctactgattagataatttccattggactaacatcatcaagctccctaactcttatgtcattttgtatctgttaagcctttccaagtaaacctactttaaaaaaaattgtagtttagatatttaattattcatttgattttcattttataacgcctatttttttcctgatatttctaactttttttcaccaagagcattgcttcctttacttatttaagcataattgtaataacagctgcattaaaatccttctccgctaattccaacatctgtgtcctatcaagcttggtctcagttttgggggccttttagtttttaattctttattttaaactagctgaaatatgtggagtgattagttgttgtttctggaattgtgaatttggtttatttttggagattttagactctgttatgctcctccaaaaagttgatgaatatatttatttcgtctttggggttttattttttattccttggcaggaaattaagttagttgcattcaaatgaaaacttcctgttgtgggggggtggtgtgcacatccactctcatggaactcctctgtcctcagctaccccatttggaatctgctccacttaggcatagctcaagagtcaaagtctgggcagaacctgcagccacagtgtggggctctccagtctagagctctcctttctgggattcctccctcattttctggtggatgtggttttgctggttcagaaagaaagtggatgttaggatagagttttggttttgccaccagcactgacatgcttgacctgaaaatcaaaaaatggatgattcgctataggctgttcaactccttcggaatctgcctgtttcttttcaactttctagtgctactagtttccaggtgtttttctgttttacgtatttatttttatatttcatccacagttgcaagtgaagaagggttgaatcccataggagtttatttggccatcctgaattgcacttttacaaaaaaataccttcctttgccttcaaaatgtatttacttctacttgacacaaacgtacaaatactagttttcaataatagctacctgcctttagtttactgcattctatgtaccaagcattttacaccattatattatttcaattcttatttctctgggagatagactttattatttcgcacttgtagtgaagggaattgtgactataatccatgcaattgctgaaagctctaaacaggaatcacatagttttaagtattgtgcatattttcatatatataagaaatatgaggttctgtggttgtatgtgtttgtgttttctgtgtttatgttttgaaaattaaacatccacatgattaaggaaggcttcccctttatttctgtggatctcctagaatgatttcaactctgtgaattgggaatacagaaatgaacaaagtgtttacaacttttgccttactctctgcaattccttcacatggagcctcacagtcatggaaattgagtatgaagctcataggtttcaaggcagcccaaaagccgtcttttccactacaacaatttagaagcttgaaaataaacccaacctctatgtacagtggaaaaagtcaaatcaacacaaccttggatattaccacttagaacattctttcaaaagtttttaaaattttgctcgtgacatcagattttgccttgaattacacaatatactctatatgtaaggaccaacccaattatcacctataagtgtagcgtagatgatagtcaatattcattctggttttctctttatgatccactatgtcttatttcctgttaccatcatgattctagaaattggcagaacatgaaaacttttgtgatttcacttttagaaaaaatcgagatgaagcacttcaaagaacgctcacaacaataacttgtttttaaaaataaaaagcaataggtgcattaaatgatgagaaggtaaaaataggccaaaattagagttgaaagaagagagtaaagaaatttagctgaagtactacaaaatgaagaattgtgaaagctgacagttcttagtcacataagagcaaggtcgtacttaatgaagctaaaaaaagtaaatttagaagaagctgagggaaattttgggagctatttgttattctgtgcgactgtcttacttagattctattttctcctcattttctggctgtcctcatccaatattctttcagaggacctgggatgtgtcttagtgccagatggcataaaaataaccatgctattaatcctacagtatgagggatatattcacttttcagtattgagataaataaagcaaaatgaattgaattttaatgaatttattctggggaataattctctgaagtatagttatatttagattatttctaagtaactcaccaacatgcaaatattgacttgtatagacaccagctgttttccatttcagcaatttatacacttgaaaatgaacccaaatacaaaattttgctaaattatttacctcattattaattggttgaaaattgctttgttaatagttgggtttaaaacagtttaaattcagtaatatagtcaataactagtctacagctatacaaatatttcaagtagtcttaatctatacagacggtttttgacggttgcttcttttgataaatcactataataaaatctttgtcattggctttgggaagctttaatgacttcaaagaaaaatgcatttattgcttctgcttttagacatttagttttgttataatattgatatggaatagacaaattttgtaatataatttattaagtgagcttaaatgggttttaagttgatcatgctctccacgtaaacatatacatataatgcataacttgtatggtccaaattagttaatgtcactatgctaaattgtacacaaattatacagctttttgtaaccccagagaaagcaaaaacaaattgtttcataaagaaagtcatgaaacggtgtcagctaaacaatgaaagaaaataaaaactatagattaacagtatttggcatctgaatgtaaaatgtagtatttagtccataaatgatagcagtattttcaatgtctatctcatcaagatagaatatatttaagttttttgtacatgattatttactttcagagaagcatttgtccataaacctgtttatagtcaattatgaaaatctaaagtttgatactttacaaaacatgatatttgagaacatgagctaccataaatattcccagtggaagttaaaggatccgacataaattattctaccacaaatcatttcaaactactgtcctacatttgggcagaactcacttttaatgtgaaatatccatccttttataattgacaatggtacgttaaaattttgtataaagatgacattgagattccagaccatttaatttcattgatttaggaaaaagaaacaaacaaaaaaaaaacattgcttgcaaagtagttctctttagttatgactgtggtacataatcatttccatgatgcctttttcttggtagaattttctgagttttttttctctcctccagaatgcacactcctcttaaacttccacgtggcagaagtagtttctctggataaggcaccacactttgaatttatttatatttttgtgtgacagtttgagtctgccttccctaatgggatatgaactctacaaatggggacatgcctgtctttactcactgtaataaccccagtatgaatgatgagtaaataatgctcatacagtgaataatatttcttcagtattattagacaaagaacaaagttgaatacagtaaatatcaaaatgatacgaaaaactaagcaggattaaattttgctaagctgaaaatccttccttgtagcacatttaaaatgtaaataatatttcattctagtatgtgcagcttaaggacttaggataatctaaaaaacaaagtattataaaataaagatgaattgttgatatatgtttatgtaaataaaaacataaataccttcacctaagagaatatagagctctctaagatgaagtgctgaatttttttttgatgctaaagaacagaaaaaactcaaatgttatttttaatatcaaaataaattttatatctgctaatactaatgtaaatgttttctgtccaaatctcttgttacaggtaaaataaagtggcaaatgaatttcgtgggaattgataactaaaaatgtcagatatccccttagagaatatatgtaactggtaaaatattaaacgatgattaatttattccttgttctgcatagcggagttaatctattattgtagtataactcacactgtgttggggaaattgtcttgatttgtgagacgttttggagcactggattcattttatagatataaaattgtcaatgtagaaacggtttgcatgttctcaggttgtgtgtccctttcagaatttttccaccctagccaggtttctcaagaggttgtgatgacagagcagtccttcatggttgtcagagtgaaaaaggaagcaggctattgtcctcagggagccagttcatatctgttctagcccagaaattataattggaatctttcccaatccactggtactttatatatactaagaaaataaatcagtactctttccctctaagttttaaaacatagaattgtttctttctctgggagggtggaggggggatattttaattcctataaatattatggaaagataagtgatatggtttggctgtgtccccacccaaatctcatcttgaattgcagttcccataatccccacgtgtcatgggagggaccctgtaggaggtaactgaatcatgcgtgtggttgctccatggtgttctcacgacagtgagtgagttctcacaagatctaatggttttagaaggggcttttcccccgtttcttggcacttctctctcctgccactatgtgaagaagaatatgtttgcttctccctctgccatgattttaagtttcctgaggcctcccagccttgcagaactgtgtgtcaatcaaacctctttcctttaaaagttaccctgtctgaggtagttctttatagcagcgtaagaatggactaatacaataagcatagactttctctggtttatggaatattttaactgtaatagtgacagcaggtgatgtttttgaattcattactagaaatgtaagtatatatgaacaaatagagccaaaaacgaatacctaaaacacaaatagctaaaagaaaatgaaataatatattaaggattcatgtcctaaacttaaaaacatttgatagttgcctgttacctttattataaggattattctctaacaaggccttatgcatcgtgctccaaacaaaacatttagccatatcttgtctttcactgctactcatctctggctctccaagccctgacccaccctggggaatgacctcacatttcaggctctgaacaacaaccatatcagagtatacaccatcacgcaaggccagccatgcctttgctttaactgctaacttaagataggctactcttttctcattttttccattatctttccagtctgaagaactactgaaattttgaactataacatggatatcagtaaaaaaatcttacacaaggataacactttcctctgaattatatcatcagaatgaagaataaattccagctaatagtaagaaaaattgcaactctaggtaattctgtactatgtggtatctaacccttattctcaatataattggtcataaatgatatatattttaagcccctacttcattttagtgatgagtatgatgaagtcaagaaagttaaatgacgcatccaactgcacccaatgggtaaaaactggtgtagagagaagtctctaaatccagatgagagctctgtgaatttcagctactccatttctctactgacacctcccactgtaaaagcccatttgtcacctatatatatatatatgtgtatatatatatatatatatatatatggtagacatatagattatatataatttatattttttatcagaggtatcttttaatggttcctcagtcttttattataataagctcttaataatttttatatgcaataattaatttgagtatcctatacatatcattactcttaaatgtctagttgaggcttcacctcagtttacttgcattgtttaacttttttaccatcacactgaagtcactctggtcaaaacaacacattccctgtaaaccactgctatgcctatcaaattcctcctgctgtcacttgaactgctggtcattcaaggtcagtagatccacccgggtgacaaaagggaggtatatttgatctttttcatgtatttgtttcctaagacagagtttaattcttgtttcttaccattctcaaatttgctctttattctcttgtcccaatgctattgccctatgataagcatttttcagctcattccaaaagttgttctcactctgttccatgggaattttcagatacataaaccaaattgagcctaaatatgcctccttcctttctctgacttgtaattgatgcccaatatagcaatgtccttcccgaagaccttgccatcatcacaaaatcctttacatacccatactcgccctgcatgtgtgtccccaggctctccgattcctctttcatctctcagttggaaaaaaatagcgctatttcaagaaatgcaatccaccagtagggagtaggaaaaaatatgtttgtaagaaatgcctacatgccaaagagagaaatcttcaaataatttacatggaaagtgctataatgaactttaaaatcagcttacaaatttccaatggcaattcagtttgctattttcaactctttgctgcatttctacatcatttttttcttttaattttcttacacatataaacgtattacgtaattgcactatgcattgataatgcagacctaactgtgccataatgatgagtttgatatccaactttttttttttttttttttgagagggagtcttgctctgtgtcgcaggctggagtgcagtggcgtgatctcgactcactgcaagctccacctcccgggttcacgccattctcctgcctcagcctcttgaatagctgggactacaggtgccaccatgttagccaggatggtctcgatctcctgaccttgtgatctgcccacctcggcctcccaaagtgctgggattacaggggtgagccactgcgcccggctgatatccaactttttaaacataaaatcttcgttatgaaatataattttttttttttttagtttttctgtatttcacatgtatttctaactatccttttgagaaaaaacttgctgtattcttgctaataaatgtttaaaattatttgttctccatagattgctttaaggcaacccttgtatttaaatttcaggcctggcacactggcttacacctgtaatcctagcactttgggaggccaaggcaggtagattacttgaggtcaggagttcaagattatgttggccaacgtagtgaaaacctgtctctactaaaattaataataataataataaatatatatatatatatatatatatatatatatatatatatatatatgtatgttgaaaagctatcttctcttcactttttcccacaatgttgcattaacagtatcatatgtcacccatctgatttgttgtgtccaggtatggacccgaccacaagagtggtcccgaatggaacttatacagctcattaccagggtcggttcaaatagggtggtgtttgagacaatttttattcaactactggatcatataaaagagaaaaagacacagtataaattgaatataagctaatgttttagtctatagagacatgcccactgtttggtgggaaacaactgaatgagtagatatagcccatggagaataaagtataggagtttatcaagtactgtaccatgagcagataaacaaattgtgactaggcaatgtctgcatcccttggaacgaaatatactttccataatttatgtaatctgtaatcaggcattctattcagttttgtcatgtctattttaactctggctaaaaacaggatatagaacaccatcaggcagctccattcttctgagttctatcatcataaagcatgcaaattattattgtgcctattgaaacaatgaagacagctgcacatctgatgccaaaacactgaagatatttattgatgtacttcactttaaagtaaaaacactttattagggaaagcattaaagatttcttcatggagaattagctaaattgatacacagacacattgtttcagcgttcttgtgggttcacattaatttattcctgtagtaaacttgctttctttccatagtatgaatagcccaatggatatttttgtagtgatgaaaaatagtttatgcaattaataacccatgttctcttttcatcaggttagtagcagggagtgacatcacgagagaaaacagtagccagggataatggaatgtttctaatgaccctttgaataccatcttcataggctggggcagaagggccatattcttgcctttccaccccttttctcagtgtcttctcatggagttgtaaaaataatataaaaaataatttaaagattaagaaaattatgttcgaatattggtgtttttttttttttctagatatcaaaagggtggtgagtggcccagctaggaatctacgactcatctgacaacagtctctgtctccatgtttgtgttcctcactcgttccatgtatacacccccataggtacacctgctcagtttgcaatttacaagccatgcatttctatgaatctttacttgggttcattctagctccccagtagtaatagttgtctcctccttaaaacccatcatcactgcctgcttttaaacaatgactcctacttgacaagtgcacaccacggttacagtgtacctaagagtaaggcacgatcttacccgtgagtacttcacaagtgaaaggtgaagcaaaatctacacaaacaggtatcagaattctacatattgaatttccaaaatgtactggtgagtaatcatgccattacatacattatccatgtgttacatatgatcaataaggttttattaagctctctgggttccaaatttcttacttgcaaaagaagatactgatcaagactgtcttgtccaacacataggtttctccagaagataaaactgtattgcatatttatgtatgatgtcatagtttttatattcctttctggagtttagaagctaaattttatcagttttattagcacgacaagacaaaagtaacagaatcactgaaaatgggtatttcttcagtgaagactattctttcatttctgccataggagagaaaaataatgtttcattttaatataaggtgaataagactgggctaaattaccacacccctctctaagtatttgatcagatagctagataaaaattcaataaaggtattgctatggatttcatgtttgtttacttccaaaactcttatttagacttagacccaaggtgatagtattaagaggcagggcctttgtgaggtgattaggctctggggactctaccctcctgaatcaaattaatgcccttatacaagaggcttcacacagtattcatccccttttcgcctttgcctcccttgtgccatggagggacacaaagttcatccccttgggtaattcagtaagaatgcaacactttggaagcagagagattggactgcttccagacaccaaatctgctgaactcttgatcttagacttcccagcctccagcattgtgataaataaacttctgttatttataaattatccagtctgtggcgttttgttatgcagcaggaacagtctcagacaagcattgtggtagctcattttgaaatacgcccagcgattctcgtctcctagcaggtaagctctatggtcccctcccacgttgaataggtttgatagggttaaacaacagggtattgtgtgaattacaaactgtgatttctgaatatagatgattataaaaggctttgcagcttcctcctttttgccttggatcacaccttctggggactccagccacggtgtcatgggaacactaaattagccctacagggaggctcacatgacaaggaactggggtccccctaccaaccaccggaaaggaaccgaagctgtgctcatgttgacctagttgacccagaacactatacccaaccactgcagaatacataaattttttgaaggacaaatggagatatggactaaaatagatactatgctacacaatgcaacaattctcaatgaagtccaaaacatttaaattctaaaaagtattttctctgaccaaattaggaaaaggtaacaagagtattttttaaagaccccaaatatctggaaaccaagcaaaacacttgaatacacaatggatcaaataaattgttacaaataaagttaaaaaaagttgaaaccaaataattagaaaaataagacatatcaaaatgtgttggatttagttacagtagtgctcatgggggagtgtgtagcttaaatacttatattacactcgaaaaaccatataaactcaattatttaagattctgcctcaggaagttaataggaaaaaaatatataaaattttaaaaggcaaatagagaaattaggaaagccaaaggcattttaggggaaagattaattgatgaagattactgagacttatcaagaaaaagaagagatatgtattaactacattaggaataaaagatgcaaaatctctatagatcctaaggacattaaagagcgtacaagatatactgtgaataaatttttccccaaaattatgaccacacaggtaaaatggacaaagtcctagaaaattacaacctattaaaactaacacaaggtagaatatctgagcagacgtataagaaaaatttaatatttgatattacaaacttttttaaagttaaaatgacaggcccagatggtttcactggtgagttctgccgagcatttaaaaacaactacaacaaaacccagtattttaagaaatcttttgaaaatagaggaagggcaaagattgcctaagtagttctaggagattaacgtaattttgataacaaagtctgtcaaagacctaaaaaataaaactaaaaggaaacacacaaaaacaaacaaaattacagaccccgcttcattatgagcctagaagaaaaaaacctttcttttttcgttttattttattttattattattacactttaacttttagggtacatgtgcacaatgtgcaggttagttacatatgcatacatgtgccatgctggtgtgctgcacccattaactcgtcatttagcattaggtatatctcctgatgctatccctcccccctccccccaccccacaacagtccccacaatgtgatgttccctttcctgtgtccatgcattctcattattcaatttccacctatgagtgggaacatgcggtgtttggttttttgtccttgtgatactttactgacaatgattatttccaatttcatccatgtccttacaaaggacatgaactcaccattttttatggctgaataggactccatggtgtatatgtgccacattttcttaatccagtctatcattgttggacatttgggtttgttccaagtctttgctattgtgaatagtgccacaataaacatacatgtgcatgtttctttatagcagcatgatttatagtccttttagtatatacccagtaacgggatggctgggtcaaatggtatttctggttctagatccctgaggaattgccacactgacttccacaatggttgaactagtttacaggcccaccaacagtgtaaaagtgttcttatttctccacaacctctccagcacctgtcgtttcctgactttttaatgatcgccattctaactggtgtgagatggtatctcattgaggttttgatttgcatttctctgatggccagtgatggtgagcattttttcatgtgttttttggctgcataaatgtcttccgcatcacgccacctgacttcaaactatactacaaggctacagtaaccaaaacagcatggtactggtaccaaaacagagatatagatcaatggaacagaacacagcctgcagaaataatgccgcatatttacaactgtctgatctttgacaaacctgacaaaaagaagaaatggggaaaggattccctatttaattaatggtgctgggaaaactggctagccatatgtagaaagctgaaactggatcccttccttacaccttatacaaaaatcaattcaagatggattaaagacttaaacgttagacctaaagccataaaaaccctagaagaaaacctaggcattaccattcaggacataggcatgggcaaggacttcatgtctataacaccaaaagcaatggcaacaaaagccaaaattgacaaatgggatctaattaaactaaagagcttctgcacagcaaaagaaactaccaccagagtgaacaggcgacttacaaaatgagagaaaactttcgcaacctactcacatctgacaaagggctaatatccagaatctacaatgaactcaaacaaatttacaagaaaaaaacaaacaaccccatcaagaagtgggcaaaaaaacccttttaaaattagtagatcaaatgcatcaatacatgaaaatggctagtaatatttgtcttcggaaaggtaaaaccacaatatgtctgctcttatgactaaattatttttataaaagcagaataattaaaagagaaagaattttaaaatgtattttttcctgatttttcagttagttttactctgtagagtagtaatcccttactacaaaataaataaaagtgaaaagacaaaaattggaaaaatctttcaacttttatgaaaaaagtgacaaaaaatattggtttgttaaaaaagaaaaaaaaaaacaaactacaaccataaatgcaatctagaattagaaacaatatgcgatttaaattttttaaattcctaattttaacctcgttttcatttccaccctttacatgattttgttgtaattgctaaatcatttaaaacatctttcattaagcctctaacattttaatcctgtttttatttttccttacttcctcaaggaaaaggacaattggtaggatgttaggaactcgattccttaatcaaccttgttgggagagagaaaatgaaagcgagccttccagagtttgccaagccctctttagtgatggcacaacattagcaagaccagtagggaaagcactagcaatagaggcatcaattagcaataacagaaaaagcagcccctctgctctcttgcccacccccacccccctacccaaagcatgtggcttttatgtagcatttccattcaagtcctgctgagcaaaaattccagtgcctcaagacagctctgttccatcttgaagaagaatgacaaaagcatggtctaatgcaaatacatacattcagtttaaaaaagaaaaaacaaaaacaaaaacaaaactacaaaaattggtaatttgggaaagcacctgcagaaagaaggagatggccatattaccacagcaggcgcgtgacagggaatttagatttttccttatgcaaactatccacaaattctaaagttcataagcaatatgttgccaaaggaagtgaatgtgtttataaatcagggaatattggtccaaccagttggacaaccctgaggctgagatgtcaccggccttgaaggcgtcaccattacagactctgctgaggatggcagcacagtgcctgcaacttcagcccagctagacatgaatcatctgattgatttagggaccctgacagagcttcttccccaaaaatctgtgcatagaataagaacatccttatctagttaggaagtttaatgaagcttcttggagtaagacaaaatgaatggcatctcacaactcaaagaaaaggaaaaagaagctatattggagaagctccaaaaaactgatattttacattgtggtgattttgattatttagaaaatgagttttaattgctcagatcatgtttgctgacagtttaaaaccccttggatactccaattctttcctaatataaattttatcctatccgttctttgtaaccctaataagctggacaagcctaggaagaagaatatgaaagaaactatcgacgcttgcaacaacttgtgggaacctcacgggaactgtgctaagtgaaaaaaaccagccctaggtttttgcatactgtgtgattccaggataatgctctaatatgatcccaaattgttaataaaacattctggaaatgacctaatagtaaaaatggagggaagatgtgtggcttccagaagttaaaggaagtaaatatgtttatcataaagacaccatgaagcttcctgatagccagataaaagttctgtgtccccagagtttccctgtcagtatccgggctgtattattattgtactctagttttgtgagatgttaccattgcgtaaggatggaagggggctctgtattatttcttacaagtgcaagtcaatctacaattaccttgaaataaaaactgtaattaaaagaaggagcaaggactaacaaaggtgtggtcctgttttcaacaaaaaatagatgcaatcaagtatcaacaaacgtattttttccatatttaatctcatttttcctactagttattctatgaggtagatgttattgctacatttaagttgcaatttttttcaaaaagtgcatataagtaatttactcaataataaaaccttacagctacaaagtatcacatcactcttctggtacatcttcatgaacaaagacaaataaggaagacctccaagagggagggacttactcgaggccacaaaaacagtcatcagacagaagttccaaagcctttttcattaagcactaattctttaatactgaaacttgaaatttgaaagcaaaacaaaattcagtacaggcagacagacttgtaaatcattttgaaaatcatattttcttaaaatactactattactacactctaattcattaattcgttctgactgtacattcatggaattctaactcattacaaaagtgactggtcaactcccaatttgtcaagctcttaaaatagggcccacagagttacatccaatctcctctactgatgcagcttaaccttgaataaagtacaatgcagacgcgagacttttcttaatgcaccaagcgatttcattctttctcattcattcatcaagtatttaagcaacctgaacttcttcaggtacccaggtagatagatgacattgacaagtattattgagtttctggtcaattaattcttacatctttttcaactgagtgaatgaacttgtgaaacaaatttcttagtctgagatgaaaactttgcatgcatccttgtcaaatttcatcacgtttctggtagcataagagagtaaactgcaagtaaatgttggcaacaatcaggcaagggttgaagcttgttaaactcactaaccagctgtgtggtttgggtaaattaccagattgctctgagcttctgtttcctcatttacaaaatggggataacgctatgtacatcatggaattaagttcctccccagtgactgccttgggctagcccaagagagatgcgtcatccaagcttagcctttcttcctggagcaactggcattcaatctctgggtgatgggaggttgcggaaatggaacaaagacccactcttctcacctcctttcagggcatctcagcacaacttagcagccaccctagctctgagctcccaaggaacggctaagtccaccatggccatggtttcacagttcaacttctcttgctcactctccttccttctccttcctgcaggtgattttccagggaccattcacactccccagggaaccacttgcaagtctgaatttgcttctcaaagaacatgacctaacacacatagctgttcttgcattttgagcagatgctcttaattctctcaatgttaaattaagtagaaaccacccaacttctgtcccttttctttccaaaccacctgtaatgaaacctattatttttatcctctctggtgtcaaaaagcaaggcgaggctttccctggctataatttctgtccttatacacttgatttcattatctgtctaactttctgtctctctctcattcccaaatctttcttcttcgatactctcacattcttactctttctcattttgtgtttgctcattcttcctctcgtgtctctgcctggcatcctgcctcccacactctcaaccgcaccctttcttctgtctctcccgttctcttaatcttctttctatattttctcttttatattgtctcacatttatttttattttagcattattttccctttgtcacctagcataataatgcctaccttacgtgacctaggtgaatttctaccctgcttaactctgctcatctttagaaaaaaggatgcctgaggtcaaaatttccccttgtgaccaaacaggctaagaacggtggtatccaagagaaaagctcacttgacctctgaagaacgtctaactttattagaatatcatttctgtgctaaatgacactcccccagcaccatgacctttgacaatcacagtaacaatgactagaggaaaccacaaaaggagaaagaggaaggatagctgcagtggggctgtgaggaggacactgcccattctcagtaaagacatgaatattcttcccgttgtttttaatgcccaatcccttcattaaagatgactgatctctgccttcctggctctcagaagctgagaagtagatttgcgagtcgtgttcccacttctcaattgcatggccattgaatacagcctgcaaagctagagttcacttttgatttaccatactggctttgcagcacagaagacggaaacgtcttacttttgcgggaaagagctttgtcggtaacaccttttctcaggtttcctctccaaactcactgaatttctcagcctctgtctctctctatccattccccaacatctctcttcactggttatccatcttcttctttgttttcaacccatgtcactggttaggatgcaaaactaaatctctcaaaccttaaaaagaaatatcatttcctgagactatacctcccacatgtattctctctctctccccttcccacccaaccaggttgagagtaaagcccaaagtcattgtcttcatgttttcaccttcagctcattcctcagttcattgcaatcagctccccgaccccaaagctctgcagggacttctctaaggtgagatcccaccaccatttattccaacagcctcagctcccaccctcccagaccaaacacattgatccctcagcatgtggactcatccctccctctggaatcactagtctcctggtttccatgacaccgctgtgttccacccgcaatcttccccctctactcatttttatattcagcgaaaaagcactcccctgccaaggtctttcctgaattccacgaagggtcacacacccctgttctgtgctcccttggtgcatacagatccccttgctgagggtctcaaaacttattcttgtagagaatgaagatattctggtcttgccgccagagcttctgacaaatagtaccatgtaggattcaggaaacttaacacaatcctctcagggattccagtgcttaacaaaacattgcttggcaagacattccccactctttatggtgacaatctgtttggctgcctgccttttgtattacctataagctccataaggacatgggtcatgtccatctggttcagcacattttctccaggaattagtggggtgcctgccaacttgtagatgtttgaaagaagaaagaaggaaagaagagagctcggtatgggggaaagcacaggctttcactgagaagacattttcagaggttctctgagaagaaaattagtaaatggtacatggttagcattctgtgtcattatttttcactcatttttgtgtccttcatagttttcaaaaaaggtaatgaaccatataaaaaagtgacacattccatatatccaagtcttatatagcattctgatttaacacaatttggattctgacttgcattacttagttattatacctcttctctcaaaggttaaatggggataataaaattatgtgcactattctaaggaataagtgaagaaatatgtgttaatgggcttagtaaagtgcttaacatatagaatgtgcccaacacagaaagctagctcaagattattttaattattattgacacaacatcattcattagtttgggggtatttttgttatgggcaataatgccactcagtctaccgagtgtgtttggtcttggagggtgagagctgaggcttctggaatgaatggtggtgggatctcaccacagagaagtacctgcagagctgtggggtcagggacctgattggaatgaaccgaggaaagaatattacatgtattattgttgaatacgttgctgactttcagatagaatgccgctataatggaaacctactttctctactagcctgttttgtaaaggaattatatttgatattgatttatcataggacatgtaaattttcgaatgagcaaaacttaacttacacttaaatacaccttttgctatgtttaactctggaagctcatcattaatagaatacagtcttaattggcttgatactgttttgagtgtaacctccacttttgactacagtacatgattgtcttaaaaagtatttttggcttgtttttgagaagttatcacgtaagccctgttgtcaaagagcttagattctaattaaggaaagttaaagccactaggtaatatcgtttataaagaaacattaaacatgagtcattatctatcatgccttaaaaataaattacaaagtgtcagattttccactcttactcctttttaattaacaccctagtcttgattggacgtgtttaatttttttaagaaaatacatgggaaggttttaaaataaaaaacaaacagctagaaataactcctactgcttcatggaaagctttgtacacctcttcatgtcttggattatcttgcttttacaacagaaactaaaatatttaggtgtgctcacctgaccttcaagtgtgatacacgaattctcagaattgtaaaagaacgtccctgaacttaagtaatttaagtgaaagaaagcacatcaatttcctaattttatctctagtaggttctagtggagttttaaatcaattttacttaaacattaaaccaacacatataaaaattgaagtagtgggttataattaataattcactggtgcgtggttaaagaacatatattctttaagtcgaatgaaaaaatagaaatatttggcgaagggatgccataactattttactaatggatgctgtctacattattagtaacataaggggcagtctttttttttttttcttttcttttttgagatggggtcttggtctgtcacccaggctggagtgcagcggtgcaatcctggctcactgcaacctccacctcctgggttcaagtgattctcctgtctcagcctcacaagtatctgggtctacaggcacccaccacaatgcccagctaatttttgtaattttagtagagatggggtttcaccattttggccaggctggtctcgaattcctgacctcaagtgatccacatggctcggcctcccaaagtgctgggattacgggcttgaaccaccacgccctgccaaaagcagtcttaaaggtgaataatgaggatgcaaattagaaaaaaataataatctaataaaatttccaattttattaaaattctgattcaataaatattttgttgtagttagaatgattccatcattgaatttgaaatgtccatggaagaaaataaatataaaacaaatgaattttaatgaagttatcaattttcttttactcaagttattatttgcacttttgctccacgtcagaaaaacagcaaacagagggatttttaaaagtatttacttatatgctgcattgctggaagataattatgttaaagctggcactcagcaatgcaaacgtggccaccgctcctttctatccctcagtattataattgtaggacatacacctcacatagagtagcaagaaaacaattccaataaagagccccacaacgagttcttcaaaatcaatgctcactccctaaaatctgtgaagacttaggaaagctgataaaggcacaagcctcgcttggtgtgctggtgtgtataaatgtatcctgtatttaacatattctactttaagttgtagtcacaaggttggtaaaatactggaagaggccttatccttaaaatggactatttagcaatggagaaacaacagaattttaacaaaattagactccgcattgtaagaaccgtacagagttttaaatagtcagtgctcccagttctctatttaaaaatgtcattgaggaaaagggactcacgtaactctgctaagacattttatgcgcctaaaaagtgaagctacttttacataatattacgtagcacatatcacagggaagggggcaattttatttcattgctagcactacttagaagcttaagagggacgtaattctgattattcttagagaaatactttctccttaagagaagaaaatttttccttaaattctactaaagaggacaatttcaaaatccattgaaattaatagacatgtattgataactatttaaggtcatcctagaaaaggaagacaaacaggcaaaacctccattaatttgttccaaccaactgagtatgggaaacccgagggcaacatttcctggcttcgtcctttcctgtgtctgatgctccaggagaatcatgacgtgacacttcagccaccagggctgctgtgctctccaccgtaaggcaatgaacttcatattggcttcagcatattatgagactatattatgaccatattatgacactcttatctttggtaaaatgataattaagcatattgtctttaagtttcagtaggcatatttaaaaaaagaatagaagtattttggaaaattattttaaagaaatgtgattctctttcttaacactaccaataattagcatatcatcttaagcaattatgagaagaatgacgtgaattaagaatgtattaaatcatttccaaacagaattcagtaggtcctttttcttgaatatttttccttaatgtgatttttgaaataattttgacaactttttaacttccacattttctttaaatataacttttattccttttactgtattatttcatgaaatctattttttaatagaccaatatttttaatttgttttgatcaaagcactttgctggttgaataatcattataagtagaatttaaataattacttctggacttgccaaaacacaagttttttttaatatttatttctctgaatcctttattactcttcctgtcactcctctctgtgtggggagtatcttatacatagtgggggtcaaagaaaagaccactgaggaatgctgtgaacatttttgtgacttgttggttattgcatagtttgaacaagttgtgttctgaatattttaaccacataattaactcaaaggcccttgtgcctaaaatctccagccataaattatacaagtcatattgactgtttgcaggtttacagtaacaagtaaacagaaaatttgaagtttcacattatgtaaataaagtataatttacctatgtttacataatactttgctaattaagctaaaaaatcacatttacataaaaaataatttatcctatacaatttaaataaaccaggttttaatttccatgaagtaaatacaaatgtagaagaataatgaaagttaaattttatatttaacgtgatatttagaaagccaaattgtttaaagccaacagaggtgtacaatttttaatgcactccccttgaatctgaatatctgaattaagatattaaatagaagttacatagatgttatgttagctcatgattcaaaggaatatagtgaaattttacatactacgagttttctcttttatatagaacaccacattgaaaaaaagtggcagaatatcggtatgctttttccctatttgaaagtcgaatttaagccaactatgattgagaggagaaagtgaattttaaaaaggaaagcaacagaacggccgggtgcagaggctcacaactgtaatttcggcactttgggaggctgaggtggaaagataaactgaggtcaggagttcaagaccagcttggccaacatggtgaaatcccatatctactaaaaatacaaaaagtagctgggtgtggtggtgcatgcctgtaatcccagcaatcgggaggctgaggcaggagaatcacttgaacgcaggaggcagaggtttcagtgagcccagattgcgccattacgctccaacctgagcaaaagagtgactgagactacatctcaaatagatagatagatagatagatagatagatagatagatagatagataaagaaaaaagacaaagaaaatcaatagaatgcaccagagagctggtgtgaaggacagtgtggaagtgacgctgtgtggatggaggaaaacggcttccccaacagatggtgcctccgtgtgtgggggggatgaggggacacagccgtgcacacgaatgtggtgagcactctttggagccaaacctgggtgtgagcttggctgcactagctgccctcgtaacctggacaagttgactgtttgtaaatcaggggtgatctactgggggaggcggtagggaacaaggagaagaatcagcaggcgactgtaggaacccaggccagaggtggctgtgagctggactcatgggtaacagaggaaagagtgggtcatatttagttttgagaactatgttggcaaggcagggcggtcaggtgtgtggatttgctgtgggaagtgaggtagagggaggaatcgaagatgatgcctggattaacgctggagcaaccacgcagggtggaggaatctaactttcagattaaatagcttcagtgggagattcttgtagacgcccacatgaaaatagtaatggagcaccgtgctgtgcttgtgtaggtcagaggagaggcgtgtgtcacacatgtggggacacacatgtggaagtagcgaccgcacttcagatgcatttacagacggagaggaaacgccggcttctagagagacagggcagtggggagcctccttctccattcagacaaatgatggaggtgagatgctgagctaacactgcgcatggagtactggataaacaggcctgccagggagcaaacgcttatcaaggaaataaaggtgaagcatagttggtgatgtgtttggggcatattgtgtatgttaaaagacagattgaagaggatactggagagacatggggaagtcattgaaggttttgaactgggaatggggagatagtgaataaagtattcaataatatagtattatacaggtggactagaaatggagagaccatggcaacaaagatcttgagaaagtcatgtaagtagttgagctttgggctaacaagagcttggattaatgtaactgcagaggaaacaaagtgacgtgacggatatggaaagaacttgggaggaagagaggtaggatgtgctgagaagttgttggggacggatagccacagcgaacacaaactggtttggttacaacgtactgcctctccttaactcaggctgatctttcatgttccctaagaggttcctccgaggagattaaaatgtgtaacctttaatatcaattctgttattacctgatataacatttgccacattagcagcttcctgcattgcctggttgtatgtggctgatgtagaaactaaaacaaacaaaaaagtaaaaaagaaaaaaaaatgacaatagtgcagctagtgattgtagttctttcttgcaatttgagcattttgtatttttgtgttgtttttcctattttccgaaatttgaagtggaaagaatgtccccactagtatcaatgtaaacatgcaacttttaaggaactgggaataaatgtatttgggagagtcaaagaaaaccaagaaacaaagtaatgtgcacctgcagagctgcgtgtgttatagaagagaaaacatccacattcaacaactgagggttcttgtaaaattaaaaggttatagaagctatgatgaggtgcatccgtacttcaatttgttcaagtcacgtagttttatttctctacatagtcctattacgtgaattcagttctaaggttttatatatgtatttgtatgcatgtttattcatttgtttttgcattggaatgtatttaaaactttttaaagtgttgaaagctaaactatcaatgttaagagtagaaactttatacacacatttttgtttcagttatttaaatgtatcattcctaaaaagattcatgcctaaaagaaggacaaaatatttcttaaccaaaaacccagagttgtcagaaacataggaaaggataataattcatgggtataatgtgtggtgtgttttgttcttgtaactacagtgttgttttatgttatatgttatcacaagactgttgttggatggttcctcaaaaacatccagggtcctagatgttctataataggtgagggctgactaagagatcagtttttctcttcaaaatggaaccactgagatgaaactcttaataattataataataataaaaagcaaccgactttccctgctagctcttgatagcaagcaggcccttgggatgccattgtgctaggatcaccacatttgtctgcagaggaaacaacccagaaataggacagcttggatttccatatggggctcccagacatggcctagtggatgcctatggctctaatccagacatagagtgaaaacaggaaggaaaaatgcaaaccagatgatccccatctaaaatgtaagaatctttgaggcaatccccataggctcaaattatgagacagccaatgactacttagaaaaaactgagaatgttaaatcctttcttaacgattgataatgcacgccactaaggataccttttcttaagtttgtattgtgtaatctgatcaattacaatgaaagatatcttaaaaatctttactaagatatttagataagaacataaggcaacaaattcagactttccaaaagcgtcactcactaatccataggtaatcatctgagaaaataaaaagaatattgtatgagttttttccctgcaatttagaagacacttgcggagttgcactccgacgctgtcttctgacccatcattcttgatatatttaatggaggtgtgtgtctcaggtaaaggattcctgcaaagccatcttgcaattttaaagctctcagttgcctcagttttatacataattgcagagcaaacaccccaaaaacaaacgccatttagatgtgtgagccagtgagtaaattcaaagggatgggcagagataaaatctttgaaaattatttttccacccccatctttttttaattaactgatgcctcattcataaatgtttactctttaattatgtactacaaaaagaagcacggctgtgccttcccctctctgcactctgagctgcaacgagctgttcatttctttctgtcatgcttaccattatatatgctcaataagcaattgctgattgaatgaatcaagtagcttggaaggagataagtcccttttgtagtacaaagaactggaaatcagaaaactagattacagtctaagctctgtcttataaaatgggtgatactgaaacacttattttaatttgcctcagttgacacctttataaaatgtgtaaaagaagaatgcttaccacacacgggtgttataagaattaaacagaccacacatgaacgttgtatacatatacgctaaataaagcatctttcattaaagggggttgtaataatttgtgccaattaagaaagatttagattccctttgaatgtcttgttgcccctggtgtgttcagattcacctcaagacagaaagtcagaggactactcagtgcagtatgattctagtaacacccagattgattagcttatgttggagataagctatctgcaacatagggattcaagtaaaaaactttaaaagatgttcttgtttaagacagtgaattttagcccttggaattcagaaagaacattcaacataaggttaatacttaaaaaacaaattcagtgtagttgtcaaattctgggtaagtacgaacattagttttagcatgattacaaatgctgtgggtgggttatgtttgccctgtctattgtttcagacaacgttctattacactactgtgtgactacgtctatccatggggcttcatcagctgaacatttggaagaaaaagagcatcatatgaaggtaaagttaatttctgtttgatcatggtatgttcttattttttagaatctgtggatcagatggaaatgaactctgtcaagagtgatttgcaggagttcatataatttttgttcaggcacagagaatgctcacttaaagttcttgttaaaataaaatatctcaacaacaaaggctgaattaagatgatctttcactcatcagatttcatataaaacccttgtaaattagaataacatgttttgcagctttagaataaagctaatttcaacacaattctatacacatactttgaatagaatctaattatattacaataaatacaatgtacttcagatgtaatggcatcagaacaaaaggcaagtaatttggaacaagaacttcataaagtatcacactgagaataaatgcgtatcataatagtgttgatcttcactattttttttctacaaaatttaattttccaaaatggatttgtcatttttttcagggtcatgttacataatatgtgcaacatgcatcagacacatattgttccatgttggaagttgtctagctcctgtgttttagttttaggccagttacccagctgcgaagtcaaccacagagagctgagaaagtggattcagtcagtggattcggcctgaaagattgggaactcaacaccctctctaaggttcaaataagtgaaggtagtgaaataccccatttctacgtattggtggtttttaattcttcactgtcttacggcaaataaaggttctcatctctgtagcacctactctaggtttatttccattcagcaatatttatcccttctgctctcctttgtcagacagggatagaattgcagtcattactaataagaagacaatgtcataaaaagttgtctcttctcatcactaaggctatgccataaatcttgctcactcattcatttattcccgtccagaaagcactgaggaccaactgtgggttagaaccagtattagagactggggtacaacacagaaaaaatgttaaaactgttttacaattttcaaagaggtaagaatacacatgaactctcttagactccaaacaactcttcagctgaattaataacaaatgtggatgcatgtgacacatctgtttttttcttcttcattctagacattattttcatctgtttttttctttttttgtccatctctgctaccagtggattccttctttcaggccccaaccatgcatatgtcttatttatctgaacacacacacatacacactcacacacacacgcacacacacacacacaccatttctaattccttccctcttcaagtgtctttctttgttctgttactttcatcgcctctatccttattatctctactgaattacatgaaggagctatactcactttctcccattttcaacatctgttcagtcataaaatctggtaatcacgcctcacctcctatcgcttacctgaagctgctttctaaagccttgcaatgccaccactcagttctaatacaccattcctaagcctccaacaatcatcttccacagtgctccttccagccttcaatgctgttcactacggattgtgccattatgagcacctttgtgaacaaactgaagtactgtttaaggcatggcatatatcaatcaatcaaactgttcttcaaaaccatcccccaattaaaaaaaaaaaacctcactttcttgggttcagaataaaccaatgcagtctgcttatttaaatacaaacaaacaaacaaaacctcttcttttcttttgggactttacttgctttctcccctccttaaaactagaacctcttcctgagttaatctcccagccacttcccttatgatagtactgggaaggctactttaaatccctgattgtatccacatcttgctcccttagaacatccttcttttccgtttatttaagttttagttgtactgggaaccagttcagacatggagacttttctaacaaaaaatcaacaacaacaacaatagtgaataaaaatactcatttattttacttcctaatacagttgtctaaactctcattcatttattttcatttttatgacttccagaagaagatataatgtaataacgtgagcatgcactttagaatccaagaaatttgggttaatccagactcctactcactggctttctgactccggggaaattacttacttttcccaataccttggtttttatgtgagtaaaatggggcatatactaccactaccttggggaagggtgaggattaaatgagattatatagtctctagcatacagatggaaaacagtaggcatgcagttaattgtcatagtattcatcctttttgtatcttattagtatcttttaccaaatgaaaccttcaccaaatgaatgcctcgtgacttctagattctggcagcattcctccaccacccatctccttccaccttccctgtgtctagtcagccaactactctgtagcccgttcaaagcagaatcaaattcactatccttttatctccaaatgttgcttaacttttctaagccttagtctcatcaactataaaatggattaaaaatgggtatcttatagaagtgttgaaggatcaaatcaaagaatgtataaagagaacagcatcacctgggaggtggtaagagctcaaaatatacagtttccaccgtgataatggggataagtatgtccatcatttcgatgatggaaaaagggtgctgaaattgccattcatactgggagactctttaatttttttcctcataaacttccacactgctgttctagggagctgcaggggactacataaatgaagtcatcgatcttacctttagagtatggtgccaaaaaataaaaagttaaaagttaaacatgtataaactgtaaaagcaagagcctcagagacttaaaaatatatgttagaaagcctccatttatacaagaaataaagaacagaaagtggtgtatatgaaggtggaaatgctaagaacccagagtattgtctgtaatcactccatcagcacaatactgaaatctgaactgcgtagtcctagaaattcccaatccacgcagcctgtgattgcagaatgatgcaaaggcagatgatgccagagacgagacggcgctgggttcagaactatgcatctaccggttaaccagcgaatagtcttttaagggcctcagcaggacacttaagaaccactctatactgtctatgagtccatctgaatacatctatatgcctacatacacgtatgaattcttggttttccttttgttttttgctgtttctcccctgaggttaactcattgcaacactttggtgttcttccaaactcccatgttaaagagtttcacttgaacagctgtggaaggaaagacagtgcaaatgggcagccctaaccaataccacattccatctggggccctgacaacgatcccactcaggttggttgggcaggtgaatattttcattggctgcacagttacccttgtgctctgacactgtcaaaacaaaaggtctccatggtgcagctgtcctcagtcaccctgcagtcaccaaatatgccgaccaggaaacatacctaaaaaattatggatgtgtaggaagtttcttaattttacagaagtacattttaaaatattccaacccaaatgtaggaggaccttctgaagtaccttggctcattttaaaagtctttccaaatagaatgttgaatttatgaaagtgatggtaaccaaatgattgagtaatcaaaccacattccagaggagaaaagcaaactgggccaatgataagtgaaagcttttgcttaggacagcaaatgctgggtacagaagtctgtgagttcaaagtgaacggagaattactcactccgcacatctctgaattgaatctgaaaattcaaattgcaattgcccatcatcttgttaacaactactatctctcctaataatgtacagcattttcccagtggacttgctgttagagcttctaatagagaaaggaggactcttgaatcccatggtgttggggactggggacccggcaatagctgagggattactgtcacagatatgcagaaatcccaagtcagtcttctgagatcagcaagttttacctgcgctgcactaatttctgaagtaatgctcattgaaacaaataagaaatatataaaaacaaaaacaacctcaaatcatgtaaatgacttactggttttgtttttctgtgttaaatgctttattgtctcttttgtaatttaggactcatgccccttgcccttctgtaatgttttgtttttagatatgctatactttacacattataaggaagatcagagaaatcatgatcttagctttttctattaattttaaacaaatatgtagaatttttgctttgtttttccttgcaagagaaactggacattggtaacttcgtaaggttaacccctctggagaatattctccctgattctgtcataatagatttaagaaagtccttggtcagtttcaggcagatatcaaatctgtcacttgaggggcagaattctttgaaaacttagcgacaatggggaggcttatggtcactgaaatgtcagcttatcacaggaggctgactcccaggctgaaataattcaatctaatgtaactcatgtctactcaaatgcctcctgttcttggccttttaaatgttttttgctgtaaaactttaaatactccaatattcaggacatttactgataatgttctcctaaaatgtatccaaaagattttagacaagatattggaagcagatatttttgaatttaattagtccaggacaacaaaaggaagatgatttttctccttcagcagttgtgtgcagcccgcattcatatcctgcttgatatcaggaaggaatctatcctgagaaccagcgcccttacctctgcagtctaaaggttatagcaaagtgctgagtgctggagtcacacatttactttaaaaataagtgacaaattccctgataactttaacacgtgcagagccagcaaataaaaatatttgtattctaaactttttactctttgacattgtgagttgactcagcgggtcagagaattatgttacatggttgtgcccttggttttgagctccagacagttctataaagtggattctatctctgaacacgagttaacagttattttgcaaagtagccacaactgtgagccagtcagcacaaaaccagtaacagcaacattttctaacaaaaaggtaaatatatataattatatacatataaatctatactgatgatcagtgtatacatacattatatatatcatactgaaagtatgacgtgtgtgtgcatatacacacagtgatcatcaatattctccagagtagaaaaaagttggttttgaattccagatctccaatgattttcagggaaccattggccaaattctctatcttttctaaaccttggcttttttgtctgttaaaaaagggtaccataacatccacatgattattttaaaaagggttttacatatatataaataaacatataaatatatataaatgtaaatatatatacacacatgtaaaactgactgcatcaaagtttgatacgatggatacaaaaaatgttggactcattcagatattttcatgtaaacacttgtgtagtcttaaggatctttaaatctcattaggtatctgatatgccacatttttacatgattataaactggagtgaatgcttaaaacccatgataagagttcctttatccaagacttgatagtaggaaaagctgaaacttcttatattacaaaagttacctgcttcaaaacagaatgacagaaagggtaaattccatgacagcctcttcataaaatgctctaactccctggcagcattgtctggtgctatatctcttgcagttaatatttgttctctccaggttcccaaggccaaacagctttgtgcctgtgttgcaacattcactcctcaaaccctgtgctgcagacgcgtgagctcctgatgttctaagagtgccccagctgcacacctgcacaggcctgtccctgccccagcctggcccttctgggcattactcaagtactacaataggttctccctcaagacacacaaatgatcaagattgacctgtcccacagaagcagagtgttgattcagtccctcgtctgcagcagttactgtccttgattttcactggaatttagttcattctctagggtcatagtgtgtgtgaatgtacgtgagtgcggatacacatagagacatagatacataatgatttatctcactccatcttttcttttgagttctaagcacccatgtgcaaggattggtgttctccacatgagtgcttagaacacaaaaggcattaagactgcacactgtgaaaaaatgcacagggcagtactacacacacacgtgtacacacatgcacacgcacacacacatgcgcacacgcatgcacacacacacacaggatatgtgcactgaatgtatttgactctattgaattttcttgctttcacggattgaggccccaccctcccacaccctaaatttgcaacttttcaaagccacttttctgttaaactgtaaataaatgaattaataattgcatgagaacggtctgaattagagtgtctggaatgaggctagtttgtcatacatgggaaagagctgtgccacagactagtaaaacagcacagttccaggcggtttcacacaatagctggcaacagtcccaagaggaactaggtcagagcccggggaaaagcacaatccggctttccgtttcccaggaactgctggctatttgctgacctttacgaagagtgtctttaaatgtttccttgagatcaaagcctctgagtgcttagccttacatttttaggtattactttttcttttgtatccattaagatcaatcccactgtgagtgagaattacacaacagtagtttaaacatgcttgctcacagccactgccaattcgatcataatagaacagtttcacattaaaaaaaaagcaattcaattaaaaactacattatagaaatgctaagggcctaattccaactaaaggcagcaatgaaatttaaagtaaagacagcaagggagggttttaatgtgtccttagctccctacatgtaatacacaatcactaataacgtacaactgaaaattagatatccattccatggatgccatacatcctaagattattccaagggcagaaaaagctcacataacgtcaaaggaaaccctaaatattgatcaacggccgtattcaactgtaaggtggaattttcattttaacttcatttcattgctttagtgatcttaatcttgtaacacttctgaattttttttttatgtttatatgtgctttagacatgtaactatgaataagaaggtgtttatagaaaagtatttttaggaaagagcatggacactggttaaactcattaatgatgtattcattcagtaaataattatatactgaggaaactatgttccagagatggttctaggcttcattaagcttattttctgctggatgcagacaattaaaaaatacgacaaataagcaaattcattgtctatgagtaggtgatgagggctacagcagaagaggaaacagggaaagcaaaggggattggagtagcaggtggaacgtggtttctgaccccattagcaggtttacctgtcatattagcctaggctggggtaccccatggcaagatcaacccacagctttctggatcgtagtaaacataagcttatttctcactgaagaggctcctctacagcgttgaaaagtgtcctttccactgagttacttgtcaccccttttgctgaggccatgaccctctgagcttcccgggacaacagagcagacaggacacagctcggctctgtgctggcccctgcaggcttcagcccaaggttcggtgcgtcctgaatacctgacctgaattagccacaagtcccaacttcaccacaggaaaatgtagagcaggagattgcatcttcgggtgtgccaccatctccactgcatcaaggtaggccagattttaggggtgccaggcaggagaaagagctatgtagagtctctgaggcaggacaacccttgtgggtggagggaaagtgaccatcgatttattacatgtttctctggtgagtacagaccagcgtctgtgcctgatggacacccggagatctatgagaggaatccagcattgggtcagggagtgatctataaacttccgagcaggataaacacaagtattaatgtatgtgtttctgtgggtgggaaaatacgttagagcttacctcaaattctaaaaggaagtatccacaatacctatattttttaagtcaaaataaagcattcaattacaatgctgcataattgatctggtaaatattatacaagtcatttccatatcaaactctatagaattttacacaccaaactctcagctttcattctctctgcattgctcttgagtaaccctgttcaatagaaacagaatgagagcctcctatgatattttaaatttaagagaagccacattaaaaaactaaaaatgtgagttaataattaaaggtgaattaattttacgaatatattttattcaccaaaatatatccaaaatgtgatgttgataggtattcactataaaaacagtaaaacattttctttatttcataccaagtctttaagatctgatgtgcgttttatacacacagctcttaagttcaacaacagaccccgcacagctagtgatcagcggccacagtggctgacggcgatggtctgggagagctcaggtctacaccagcacacactatccgaagtcagagagaaaagaaaaactgccccgcatttcttcaactcaagtcatcgttaatatttaaaaacaaatcaataggcttatttataaaccaaaacgcgttgtggttctcagtttcacagggagaagctctacgtcagagactcagcagatgggccttagacaacactaacaggagagaaaattgtatgagagctgccacatatcacgcggcacatctccaagcaggcatccatgtcaacgacaacatgaacaaggtgataatgacgacagaaatgaggactaacaaccaagcatagtactggttctactacacacaattccagtcaacttcagaaaacaaatgcaacaaaaaggctgaaaaacacttgcactactacagagctagaagtagctggcgccagaatggaaacccagttccagctgattcaaagtgcttgccatttcaacacgctgcactgcctcatttagaacttcctgaaatagagaggatttccattcaggaataaagctccttacaaagccacctgtagaggataaagtcctctctatacaaaaatcactcgctccacagcagaaaatgtcttgatacacatcacattggtacggatttgtttaaagcactggataatgattacaagtgaaacggatatttcaaacaccgaagaattccatgtctacagcactaattgatatctgggctaatttttaagctacaaagtagcacctgctggcttctaattataagcaagcgctttgtgaatagctgggagtatgagcgactcaaactgcatgtacaatgagcaccaccgaaagctcatttgaagtacaatccatcatctgtgtccaacatgacagggaaccgggcagcgcacacgctccatcagatgctgtgattaaagggagggacgctgcggtttgtcacatgactgcacgaggctgtcaccacctgctgttaataactgacaggcaatctgagcctgctttataagaacgaagagacaggctgcacattctctctgatggaaatagaaggaattactcactctttcatcttcctaaatacaaactgaaacaaataacattttcgtcaaagttttgccccctacggactgaaaactgcagtaaaagtagcattgaccggggagcttagagaagtagaaagtaagggaaagacagaaagactgcaggggagagagagagagagaaagagagacagagacagagacagagacagagacagagagagagacagagagagaacaagaaaaagacggaggaggaggaggaggagggtagggaaggggagaagacagaagagagacagttttatttttattaagttgtatcagactctatgggaaacaaatcaagcttatgtgaagtccttcgtaaacatttaatatttaatttctataggttgagttgtttcaaatgctgttgaatgatctctgggaagccagtaaactcatatgacaattgtaaaaattgggtgttgtatgatgattctcctggcatgcaagatctcaccccgggtatctgtatcaagaactactctcgaccatgttcatagcatacgacaaagtgactgccatgttgttcatcatttgctcatgaagggctctgctttaaaagcatcagatttagtggcaagtgattgctcttataaatgcagttttaatttgataatttatttgtaaccccaactgttttcccagaaatcaccatccactgatatgccatccctttagatttccacacggcaacagcacaggttcccggcccgagagtctcagaagagccttttgaaatgccacctgacactttcgacaaattattttcccccttttagaacagttaagcagacaatacttaaaataaacgaagtgtatgcataccgacttttgttacatttagtttctaggcagctcattaagatctgaaatatcttgattctaaagcacaagctcctaagtagcatggcaaagaccagcagagttctgcatatgcatgcacaacatcagcctatctgcaagaatttgtcactttagtggaaacagccagaaatcatttaaaaaactgtgacaaaaaattccatcgccttagaaattgtccatttatgtataatttagaaactacagtttttccgaattatctggaaaggattggtttcaggacctccatggatacaaatatctacagatgctcaagtccgtcatataaaatggcatagtatttgcatataaccgcatccattctccctatatacattaaatcatctctagattatttataatacctaatacaatgtaaatgctatgtaaatagtgttatgctgtattattcatggaataatagccagaaaaaaatcctgaatattttcggtatagacacaaccatccattttttttctgaatgtttttgacccttggttgtttgcagaacacacagatatgaaggagcagctgtattttttttctatattcctcaaagctgagctatcattttcacgaataaaatcttatttcatagatttactgggcatataatatagtgacctagcaaaaataaagaatcttaatcacggtgaaagtttcatctatttgggaattgagtaccacaccactaaatatgtaaccctactttacaatcccatacatgctgtgcatgaataagtagacttattgtcagtagtcactgaagttttcaggcaaaattgaccatcatttcccagtcaatgtctggaactacgcaggagcatttgcctttggatattgttggaatcaaaagctctagacaacatcattggcaaccttgtaagtttgttgtccattatcattaaataattttcaagatactccgaggcatatgatgctatgaaaaatcttaaaacaactatgtcttatttttaaagtgtcatgtaacataagacagtttgatttctgtggtcattgactgagagactaaacaaaaagggtgttaccataaatacttaaaacagagtaagataaaaataagggagaggtccaagacagtcattgtgctttttctcataataaagttcttttccaggcaatttgggcacagaaaatgaaataagatcatgacaatttggtgaataatactctatgaaaaagtccaaggactaactagaaccacagaatcatcctgtgttaactaaaatgattaagataaactgtgcccaggctagactgaaacttgaagtcacccaatgatcacgtggaataataagctttcctccagcatggaaataacggtggagttggaaaagtgtcttagaataataaggtttaaatatgcaaatctgccatttcatctggatcacatatctaaagaataaaatttaaaatctagagaatatagatatgaaataaaataaaacaagactgaaagcttggcaacgaaacaagtcatgatatactgtgagaagcaattttaatttatttatccaccatttcccaggaacttgtgaatttttggcctctaacttcagcctatggatatgtatgtttttaatctaagggaaaagtcagccagcagaaagagtcaaaaatatagtactctggaaatctacattttcattacttttcctttaagccagatccctctcataaatactccaagaaatgttaacttttcatatattattttcccctagcgtgtgcaagttaaggattttcatttgtatttaatttttaaacaattttctgactagtttaatttttaaacagatttctgaaaaccattttgtactttctccctaatatatacctgatatatacaggtgtgtgtgtgcatgtgtgtgtttctataaagttacctaagaaaatgttttgctgcttataatttcagggttttttttcccctttctcatgctctcaaccatccagaggttcatgaactcagattacagacattcaaacgagagatattttcaagaatatgtatgtttttaaatgttctgcttctatttctactttttttaaggaaatcagagacttttttccttgaagagtactgaaatattattttcttatgtcaaaagacataaagtgagacaatgacattctagaagtactcagctgatcaattaataagtattacagtttctttctaaaatgcaatctgagctggaacaagctcactaagagatgcctgcaatcagggactccctgcgaaaggaaataacttaataaaccttgcaccgcatggaaaaatctggtagaaatctagtatctttcaaggattccttctacaaagttttgttttgctctggtttggttcgtacactctaatgatttcggacagaaaagtttccctgttcccaatatttttgttgatatttgtgttatgtttgtcatcatcttttggttccacgtctttgctttctattatcatcagtcagtttgttttagatatagatcagtgaaatcttatgagcagaagaatctgatggctgaagaaagaatctgctgttacgaaaaaagaccttgggaaaagtttattgatgaaatacacatggaaataaacagtattaaaaaagtatgtatctttattatagaattatttatattccttaggatatatacccagtaatgggaaaagcacatgcacgagtatgttcattgcagcactatccacaatagcaaagacatggaatccacccaaacgcccatcactgatagactggataaagaaaatgcagttcacatacaccatggaatactatgcaaacataaaaagaaatgaaattatgtcctttgtagggacgtggatggagttagaagccattatcttcagcaaattcctgcaggaagcaaaagacaaacaccacatgttctcacttataagtgggagctgaacagtaggaacacatggaaacagagagggcaacaacacacactgggaactgttgtggggcatagggtgagggagagcatcaggataaatagctaatacatatggggcttgaatcctaggtgatgggttgataggtgccgcaaaccaacatggcacatgtttacctatgtaagaaacctgcacatccagcacatgtaccccagaacttaaaataaataaagtatggcaaaagcacagtctctgtaattttacatacatagttttttattgtattattttgtttataccaagtcttttaaatgacatgaaatgtataaaaatctactttatgttaacatttgcaattttgtctgaggctagtcttgaaataaaaggaaactgaaggaaccacattagcccacaagatcaggggccccttcaaagtgctgggcatccagagcttaaaagagctgggcagtctatagctgctgagccataattatcaagaaccagtaacacctctttcaggggtgtgaagctcacctcctgaggttcttagaaggcatcaatgaatgtctctgatacacctttctgtgcctgctcccgcacatttacacagactccaccctggcaacggacacaggcctgtgatgaggctagggctccatcgcagagaacccatccaggaagaaaatgccctgacaaggctgagcttgccagtaaatatttaataagtaaaagaggatgtgttccctccccattctcccctggttcttccaccctcctgccaatggagtgacccatcctgaatacaggaagtttggaaaagacatcccaaactggacacagcacgtcctgctttctctgttccctcttctggggaggctgacttcacagtctgtgcgtgtatgagggctggttctcagcaagcagggacctgtccaaaggggatcctgccccaaatcccacaaaccccagacaagcccctatatttatatatgagggtttgcaagtgatatggagatttaattacatgtttaaaaatattaaacaatatatccttaaatgctccagcttatggctccaaacgttagaattttatacacacagacataacttttgtttatggctcttcactgtattgcactttgctgatattgcgtttttaaaaattgaaggcttgtaccaacgtggcatcaagcaagtctattggagccatttctccaacagtaagtgctcacttcatccttttgcgttacattttggtaattctttcaatatttcaaaagttgttgttattatatctgttatggtaatcagtggtcaatgatccttgatggtaccatttaaggtgttttggggatgccacaaacacccccatgtaagacagtgaacttaaatgattaatgtggtgtgtgttcttactgttccactcatcagctgttctttatcttactctccctcctcgggccttcctagccccagagacacaacaatattgaaattcggacagttaaaaatcctacagtggctcctatgtgttcaattgaaagaaaggactgcacatctctcattttaaatcaaaagctagaaatgattaactaagtgagaaagacatgtcaaaaaaactaggcctgctgcacccaacagccaagctgtgagtgcaaataaaatgttcttcaaggaaaataaaagggcttttttttttttttttttttttttttttaaatgagacagtatctcgctctgtcacgcaggctggactgcaatggtgcaatcttggctcactgcaacctctgcctcccaggttcaagcaattctcctgcctctgcctcctgagtagctgggattacaggcacgtgccagcacacctggctaattttctgttattttagtagagacagagtttcactgtgttagccaggatggtcttgaactcctgacctcctgatccacccgcctccacctcccaaagtgctaggattacaggcatgagccaccgcgcccagccagtgctactcttataagtgcatgaatgagaagaaaatgaaacagccttattggtgagatggagaaagttttcaagttatctgcataaaacaccaaaccagctacaacattcccttaaaccaaggcctacttcagagcaagctcctcattttcttcaactctatgaaggctgagagaggtaaggaagttgcagaagaaaactccgaagccagcagagactggttcataagatttaagaaaagaagccatctccataatataaaagttccaggtgaagcagcaaatgtcaatgtagaagctgcagcacgttctccagaacatctaagatcattgatgaagacggctacaataaacaacagattttccatgtagacaaaacagccttatgtaggaagaagatgccatctaggactttcataggaggaaagagggtaagtcaatgcttggcttaaaaacttcaaaggacagcctgactcctctattaggagctcatgcagctggtaacttttagtggaaaccaatgtttgtttaacattttgaaaatcctagggctcttaagaatgatgctaaatgcactctgcctgtgctgtctaagtggaaaaataaagtctggatgagaccacatctgtttacagcacggttaatgcagtattttaagcctactgttgagacctactgctaggaaaaaaagattcctttcaaaatattactgctcattgacaacacaggtggttacggaagagcttggacagagatgcttaaagagattaatgttgtcttcatgccagctaataaaatatccattctgcagcccatggatcaaggaataactcaaactttcaactcttataacttaataaatgcataagtctatagctttcataggtagggattcttcgatggacttggtcaaaataaattgaaaaaccttctggaaaggattatctttgctagatgccattaagaaaaattgtgcttcatgggaggaggtcaaaatttcaaaatgaataggagtttagaagaagttgattccaacactttacagttgagtttcaagaatataataagacttcagcagaggtacctgcagatgtggtagaaatagcgagaggtaaaattagaaggggaggctgaagacgtgactgaattgctgcaatctcatgataaaacttaacagatgaggaattgcttcttccagataagataggaaaatagtatgctgagatacaatctactcctggtaaagatgccataaacattgttgaaatgacaacaaaatatctagattattatagaaacctagttgataatgcagaagcatggtttgaaagaattgattcaaattttgaaagaattgctactccgagcaaaatgctgtcaaacggaattgaaacctagagataaatctttcatgaaaaaaagtccatagatgaggcaaaatatcaatatctcattttaagaaattttcacagctaccccagccttcagcaactaccatcttggtaagtcagcagccaccaacattgaggcaagagcttccagtagcaaaaagattatgactcactgaacgcttagataatttttagcatttttggcaacaaaatattttaaaattaaggtatgtacacattttagacataatactgttgcataaaggttacactactgtgtacacataattttcatatgcactaagccaacatattcctatgattcattttatagtctaaaactgaatctctgaggtatgcctgtgtttttatatataatgctttagacgtatttttttacaactaaaaattatcttgaaaaaacgtaggattctttcacttttgtcagctaattcataatttattatttggctaataaggaacttaactgatcatacatttttaaataaatatatacgtgatcaaactccacacttacctgaatgtttatatgtgctttgcccataattgctaaaatttggaagcgaccaaggtgccctgtaagaggtgagtgaataaactgtgggacatcctgacaatggactgtcaatattcagtgctaaaaagaaataagctatcaagccatgaaaagtcatggtggaatgtaaatcatatttctcagtaaaaaaaaagccaatctgaaaaggtacatactgcatgatccccaatcatatgacattctgggaaaacaggaagacagaagaaagatcagtggttgccagtgactgggggcagggagaagtaaacaccaagaaaacagggttttcattattttatttatttatttatttatttatttatttatttatttatttatttatttatggagagggagtctcactctgtctcccaggctagattgtagtggcaatcttggctcactgcaacctccgcctcctgggttcaagcgattttcctacctcccaagtagctgggatttacaggcgcgtaccaccgcacccagctaatttttgtatttttagtacagacggggtttccccatgttggccaggctggtcctgaactcctgacctcaggtgatccacaagcctcagcctcccacagtgctgggattacaagtgtgagccaccgcacccaacataaaatagaatctttaggacggtgaaaccactctgtatgatactataagggtggatacatgtcattatacacttgtccaaacccatggaatataccacaccatgaatgaaccctaacgtaagctgtacacatcagatggcgacgtatgagtgcaggtgcctgaatggaacaaacgcgccatgaatgaaccctaacgtaagctgtacacatccgacggcgatgtatgagtgcaggtacctggatggaacaaacgcgccatgaatgaaccctaacgtaagctgtacacatccgacagtgatgtatgagtgcaggtgcctggatggaacaaacgcgccatgaatgaaccctaacgtaagctgtacacatccgacggcgatgtacgagtgcaggtgcctggatggaacaaacgcgccatgcagcagggcaggtgttgctaaaaggggcggctacgtggagaggcagggggtgcgggaaactctatagtctgttcggttttgctgtcaacctaaaactactctaaaaaatagggtctattaaaaaaaaacaaaaagcacctggcatttactgtacaatgtgccagaaaaagaataagctttctgaaatcagaaagtgaggtactcgaaatgtgtaccatcctttgtcttttccatgaagtctgagaatcaggctggtaagaggctacacctagtgactatcttcagtaagatggcctgacgcttaacctttttttttcttttcgcagtttggaaactgtcagtagttaaccagaatgaaatctggcctcctttctactcccttttcccccttgagctttgttttttcttgctgccacattctagccaaggagaaaagacagacacgtcctcgaattatctgagtattattcatctcgatggttgctggaatggcttccaaggaccccctccatctcatggtcgtttctgtctgctttcctctcatctataatcccaaggaactcactcgaagcagcatgcgtggctggctggtgggatcctccttatacatcaccgtctgcctgtaccaacactgtcatcgcctcatgcttcataacaccgggacaccaggcaaaggagctcccaagctgaacctctgcctgccgcaaggtaaatacaagcaggaccgcatgctgcaatttcagggttatgatcgtcttaataaatgatgcactcaatgtgctataaatcatctccctccgaccaactctctcggcagcctattataatactcactgattgtgacagctaatagcagctacaataaatgatggcaatgattattttttacaaaggacttccagttagagaaaaggtgtgttaaaacgctgaagcgcccgcacttctgggtgccaaatagacagactgtatacctgacactggccttctctagtcagtaacttcatcacatagcttttagagaagtaagtttagatgtcaaatagatattcagaaacacaccaggcccattcagagaatgtcaggctcagaacgtatcctagaggacacctagttagaacatctcactttccaaacaaaagacagagactcagggcatgtcaaaaaccacaaaacaaagtagaggaaagacatttaaaactagagaaagaaattttcctggaaaagtcagggcaagtcaataggaaaaaaaaaaaaagcagtgtacaaaggacaagagcaggcacatgagaaatgacataggtaaaaaaaagtttttctcaagcctcttagtcatcagggaacaatgaagggtgtaacatcggccatatgattagacaaattataaggcttgtgtgtttgcaggtgtacagaatagtgaggaaacggcccttggcagactctcagtgggagcagaggggtgtgttggtacatttatgctggcaaatagctattaatattaaaaactaaatttttagcacatgctttgttccagcaactaaacttctgaaacatgcccttaagaaatgctcacatgtgaagaagttcgacctgtatggatgtttactgcagcaaacttaaaaatagaagctttgcaatctacccatctgacaaatgtctaacatccagaatctacaaagaacttaaagaaatttacaaaaaaaaaaaatcaaaaagtatacaaaggatatggacagtcacttctcaaaagaagacatttatgcagccagcaaacatatagaaaaaagctcatcatcactggtcactagagaaatgcaaaccaaaccaaaatgggataccatctcacgccagtaaaaatggcgatcatgaaaaagtaaggaaacaatagatgctggcaaggctgtggagacttaggaacacattttacactgttgatgggtgtgtaaattagttcaaccattgtggaagacagtgtggtgattgctcaaggatctagaactagaaataccatttgacccagcaatcccattactgggtatatgcccaaaggaatatgaatcgttctactataaagacacatgcacatgtatgtttattacagcactattcacaatagcaaagacttggaaccaacccaaatgctcaacaatgttagactggataaagaaatgtggcacatatacaccatggaatactatgcagccattaaaaaggatgagttcatttcctttggggggacatgggtgaagctggaagccatcattctcagcaaactaacacaagaacggcaaaccaaacaccacatgttctcactcataagtgggagttgaataatgagaacacacggacacagggaggggaacatcacacacagggacctgtcagtgggtggggacaagagaagggagatcattagggaacgtacctaatgcatgtcgggcttaaaacctagatgatggtttgataggtgcagcaaaccatcgtggcacacatatacctatgtaacaagcctgcacattctgcacatgtgtcctagaacttaaagtaaaattaaaaaaaaaatagaaacaaatggaaacaacccaaatctaaatgtcaacaggcaaattactaatcaaagtttggtacatccacagcagggaatgctaagtgaacattttttaaagaggttgatctactactgattttactgttttcagttagaaatcaagtcacaggatgatattgatgtgtcatggactgaatatctgtgtcagcccgaaaacccattggttaaactcgtaatcctcaatgtcctggtatttgtaggtggggtgcttgggaaataaccaagtttagatgaggccttaagggtgtagaccagaggataatagtagtgttcttctatctagggaggagaccaggacttctgctctgtctgtgctctgtgaggaacaaggaagcacacaagcacacacttgcaagccaggaagagagtcctcccagaaccacagtgggctggcagtctgatcacaaacttccagcctccaaacagtgggaaatgaacatccatggcattttgctacagcagcctgagctgagtaacaaaacgttctacgatgcaatttatgattttaaaactcctacacgtttgtgtatgtttctggagacacatctgaaagggttcgacaaagtacaggacagttgccggagtctggtaagggtagtgggagggtgagaggagctggggatggttaataggtatcaaaaaaattagtttaaaagaatgaataagacctagtatttgatagcacaatagggtgacggcagttgatgataatttaattgcacatttaaaaataacagagtataattggattatttgtaatacaaaggataaatgcttgaggggatggacaccccattatccatgatgtgaatactacacatcgcatgcctgtatcaaaacatctcacgtaccccataaatatatacacctattgtgtatccacaaaatttaaaataaaaaaaattaattggctgacagccatgactcctggggcataaaaaggatttggggtaaagaagggttttcaccttttattatatatacttcagtgttatttcaattttattgattacttagctataagataagattattttataaaatcagattcttacttagactaatgccaacatgctgaccgtatgcccatccaattgtttgttgagttttctctccttcctcctcctctctgtctcatccctgccagtcacttctcacacaaatgctagaagaagaaccaggagatcaattatttccaaatttctatatttggcatcttctggcgataagggataccaaaactggcgaccgggaggctttcaaatggcctgtggcctcacacttttgggtgccaaatagacagtctgtgtacctgccactggccttctctagtcagtaacttcatcacgtgacttttaaagaagtaagtttagatgccaaatacatattcagaaacactccaggctcatgcagagaatgtcaggctcagaatgtgtcttagaggacacctagttaaaacatgtcactttccaaacaaaagacagaagctcatgacatgccagaaatcacaaaacaaaggagggagaagtcttttaaaattacagaaacaaattttttctgttttattgtttatacaccatggaatttatttaggaattctgttcctatgtgcctgaaaatgtgtataataagaatacttttcttacatggtcatggacaaactatacatgaaacatgaaccttttgatggcttggtttattaaacatactagtttagtagtccaggaacaaaggagtttcttttctgactgggtctgtttgtcaaggtatttttattttattttttatttatttttatttttatttattatttatttttgggcagagtctcactctgttgtccaggctggagtgcaatggcacgatcttagctcacagcaacctctgcctctcgggttcaagcaattctcctgcctcagcctcccagctatctgggattacaggcacctgacaccacacccagctcgtttttgtatttttagtagagacaccgttccaccatgttggccaggctggtctcaaactcctgacctcagatgatccacccaccttggcctcccaaagggctgggattacaggcatgagtgtcaatgtatttttcattacagaattcacacgcccaccacaccggtcaagggcttctttgctatacttgcttctagttactttcctatttctcactataataatattaattgtaaccctgacagatttgttaatagaagtgaagcaattgtctaaaatgtaatcaatcttttatttttttttcaaaagagaagtaaatcatgtgcataaacacctagtttaaaaaaaaaaaaaagaagtgggaattcttaggaaactaagccaagattttctaatttcaaagttgaagagggttttcatcattctgacatacttcattctagaattatggcagcaaggataaaacagcattaatttgcacaaaattacaaaggtaatattacagtacatcacttattttctaattgtaacttagttccaaggctttgggggggacaaaaaaagcattcttttttcaatactccaagaaatttaaactattagaatgactctcagataccaactcatgaatcacacatcacactccctgattttatattaaatgattagtgaatttaaattttaataatgcttatgtatagatttactaaaatatttttaatcattaagaataattttaaatctataaactttattgtataactacatgttccttttaaaataaatttataaaatatatatcaatatcatagaaatataatattgtatcgtataggatatcagagatacttactacataatgtcgctaagttattttcctgacagacttgataagaatgacagtgactccaacaccgtgttaatgatagtctatttgctgacttttgtgagggaagtgcagttggtttgacttcgtacatttcttaagacctggttatttatagatttgctggtcataagacagctttgatgaccaaatattaagggatatttaacccaagaagaaataggatttactatatactcagtgccaacaatttgccaggctgtacaccaacatgatcccattaaatatgaacaacaaacctctgacgcagttagcaatagatccagggtggaaatgaagaaactaagagacacgtagattaagtaaactgtctaaaagagaaccagaaagtaccagccgcattttaaatacctgccagtcaccccgtgctttcccaatgtttggaggacatcgcatgccctacaaaattagggctcttctgcagagatggaggtgataagcctccaatcgccaaaccaaaccatgtgaggccaggaagggcagaccctcaggggctgcagctgggcatggctaaatgctgtaacccaggattttttcctagaagtaacactttctgtgaaaggggaagatttctggctcttatcaatggaagtcactgtcttccatcaaaaaaacaaatgatttaatctccccctccctctgtaacagagttcacagagaacagaaacttggtccacataaagaaaggcaactcctgaagaaactaatagctacgagaccctttaaggacacaaatccacgttaaattctaggctactgcaaagcagcactgtggctagacctacggtgataattggcaaagacgtgccactgagcttccagctttgacaaattacaatcagagactggaatttttctgtgtttaattattaaaagctttgatgctttcataatgccagtgagattggaaaacagaaaaatgatccatcagtacacaaaataggaagatgaagaatatttaggcagtccatgctgagatgttttttataactcggctacatgatggaagggttaggaattccttagagccaagttcacagttaatgacagaaacatgtagtaaatgatacaggctttgtagcttttagaatatattaggtcaacaaacattttccaggtcactatctggagcagatgcatgccaattagtaggctcagtgggagcctcacccatcccataacgtcctttattaattcttatctgggtgtgccacatatttcatttgctttactgtttcttaaatatatttggcctttaatgtttaaatatcattattgtgggtaaatcagtgcagttgaattgcttttagaagattcgggactgtgttttctttgatgattaacattgaaaatgtgaacttgtaacacatttaaagtgaggaaattcaacgttaatttctatggtttttatcacttttgaaaaaaagtcatttttcctttgatgataacattggaaatgggaactggtaacactcttaaagtgggaaaacctgatgataacttctatggttttatcacatttggaagaagtcacattgtagatcattagaattcaatgtgtttatgctgtgataatttactgatgatgaagtcagaagaacccaaaataaaatataatagagaactaagttcaagtgaggacctatagagaatgagaacacggaactttcaacgagatacacattccagggttgtatgtgattcctgaaatcagatttcacaatctcttacaaagaagtttcttatttgtcaattacaactcaaaaaagctggaaaaaagtttctgatgtacaggaaacaaagaataattaaaatattaatggattatctaacttttttttttctacattgcattccggaacgacattcccaacacacagacttctacgcacagaacaacgaagaaaaaaaagagaaagaaaaactattttctgcaagaagtcaagtgatgaatgttgtcctaaaacagtctgcggaggcgcaggggaggaagtgggggtgggcagtacgaccaggaggaagcttcagggctcctgggcaggggagtgtgaggcctgaggtcattaacagtaagcactgactggcaaattaataacatcaatttaaacagttataattccacaggatcctctatcaagctgattctaaatgagaaacttttctttacggatatgaaatgttttcttctccatatcaaaaaggagacaggggatttgtatttaatttttttccctttagtgtagaagggaggaaacccacgaagctgcagatggccactgtggacttctctccacggggtgaaatcaccaactgccccttgagtgtgtcttcaagtatcaaagccctgagaacttacagaagctttgtggccacctgcgcccggtagtggggaccatctggggtttcctgtgcctggcaccagcacgcacagccagacctcactggcaaggcccagtgtgaaagtgagggactaagtggctaatctggctggacttcctaggtcaatagggacttccctaagggggcttttccctaagccagaatgagtcacagctgcaaactaagggactgaaacttcaaccaatcatataggaagtttaagctctagttgcagcctgatgtttttaaccaatcaggcccaccaacccacaagcagatacaaaataaactaactctataggacagaaaaaggaaaagcggaggggttataaggagatataagcataagacacccaagccagaaacagcaactcttccgggtccccttccacctcttggaagttttactgtcgcttttgctttcctttcactttcataaatcttgccgccgcacactcttggggtccgcacgtttctctaattcagctgtaacactcgccgctgcagtccacggcttcattccttgaagccggtgagaccaggaacacttccatcgagaaaaaaacctttgatcaggagaagacttcttgtctcaaaaggaagataactcttggggccccaaaattactaaactaaagggaaaggtcgagctgggaactgcttagggccaacctgcctcccattctattcgaagtcacccctctgctcactgagataaatgcgaatctgactggcttctttggaaaagctaattagaaactctaaagagcgcaactgtttgtctctcacctacttgtgacctgcaggtcccctccctgctccagttgtcccacctttctggacgaaaccaatgcacatctttcatctgttgcttgatgtcccatgtctccctaaaatgaataaaaccaagctgcgccccggccgcactgggtacacgtcggccggacctcctgagactgtcaggggcgcgcagcctcaactttgttaaaaataaacattctaaattaactgagactgaaactgcctttgcagaattataactgaggaaattatgtcagtgacagaaatcagacctaaccaactctatgttgcttctaacctttaagttgtccttgttcattcctgggcataggctgaactaaatttgcgaaggaattcagttcacagtttgactctgaaacaaaattgtttacagcccttatcaactgatagagcccttatcaattgatcaattgataacagcccaagaagacccccatcttacctggtgtccagtctgctttgcaggactaacaaattagctacaagtttaggacttacggtttaggagacacgcagcctctggctccaagagtatgaaccttcccaaattgcttctggggatcacattactattgtaaaacctaagatctaagatcggtggttgtgatatgttgcagaccctgcactccatggatcagctgataccaccaagacttttaatctggcccgaccagttttgccattgcacccagaaacagaagacagcaagaaaaactcactttgaccccctgtgatttcatcttcaacctgaccagtcagcactacccacttcccaagcccccacccaccaaattaccattaaaaaccctgatccccaaatgctctgggagactgatttgagtaataataaaactccagtctcccacacgaccggctctgcatgaatcactctttcttcatagcaatgtccctgttgataaattggctctgtctgggcagggggcaaggtgaacccactgcatggttacgagacctgtctcagctattcagcattcacaccagaatggtgccaaacacccatcacaggacagcaccctagcgaagacacaaaccaacatagtaacatagatttcacttgcttaacctgtgcaccccacctccatgggcacactggaagcaggaggtctcccactgatggtcagtgctgcagggaggccactgatccacaattgtgggatggagactggggacgggccaccttctgctgtctttcatcaatttatactgcacatgtccttgaggctttctgtatttggttttcttctatctccttattagattctgagggtttattaatcattggttggttacttcactctcctggaagctgctcctctccgtttgaaaagccaacaaaaaaataaacatacaactcttttctcatagaaacaggcaacacttcattctggagatgtgtcctaacctggggtaggagatgtccaggacaagtaaagtggatgttggcaaagatcagtcccaggaccacagcatctgtctcctgggaatgggttagaacacaggctctcacgcccacacagactctgctggaagagaccctgcaggtgaggacctacactgtcaagctgatgctggtgcacattcgagtttgagagccactggcctacaaaatatatataccctggcctccaaaatcatagttcaagttttagccaaaaatcagtcaatctcctgtgattttttttaacaatcctagttatctgattcacccagagaaatgcttctctgatccatctttgcatctgctgcagaaacaaaggatatttaaagttcctgctatccctggaggtggctgtccggccccctccaggatcaaacccatggccttacggaaagcttctaacactacaggccccgctccaggttattctcatgcggctccctctgcttttcagatttcttattctagacttctttctttctggcagtacaagcctctcccttccttctttatccttcagcttcagccacctgaaaaaaaatctccaatctggaaaatctaaaccaaccaccttttctgaaaggacacagttttccaagcattaatgaaaaaaaaaaaaaaaaaaaaaaaaaagaaaatcataaaaactaacttcaactgcagacttctccctccaccagaaaccctttggttttcctagtcagttttccttcctttccacagagggattttctaattgtttctactttcccacaccacatacaacacccaaagtacctgtatgcatattagaaccactcaccccctttacttagactacttataaggaagatattaaataataggcagtcatgatgaataaatttaagaaaggtatattcagcatttactatgtgccagctaccaagtcttgacatatattgtctcatttaatctttactctgaagtagatggtatttgtactatcattatttatcattcttattattattgttactgttttgcagatgaagaaacccagacactgccagcaaatggtgaaggcagaattaaattcaggtactctgactccagagcatgcacagttaaacactattctgtcttgcaaagccttgtgatattggtaaatgccactgctttgggaaagggatgctgtcacttgagcaagtaccacattttatattcttcaggtgatttataacatctcaagagcagtggacaagacctcaaaatggttcctcaacagtcttcacatgcatctggcaaacactgtcaggccagcactcccacccccacctctggagaaaagtttgcactcttggtcggggacccctgcggaaaaagtgccctgagaaaacagcagctcctccttgaaaggcatgtttctgcatggctgacaggtgcaatcccgtggaggaatgcatgagtaagaatgatctgagaagactcgtgaattactacaaattagggtcagtttttaatgaggagacaagaacgtgaaccaagtaaaaacttatgtggatggtaaacagtaccttcgatttggaactaaaacatctgtgatgactctattgggaaagttgcaagacaactatgaatgcacatatgccattccacatgctctccaaggtttaaaatttaaaacaaccaaacaaacaaacacattgcttactcaaaccccctcctatattctatttttacagataacacatctcatctcttttagcttatctccaaaccttcaaagaccattgttacaaagcccatgcttgctttttcctcttgaagctttagctctccacatggaaatatgtcttctttctttcatcccataccccacaacctcacgcccacacactgtccactcatccttgctggatacttatactttcatcccacacaccacagcctcacacccacacaccatcaactcatccttgctggatacttatatcctagtgcaagtagggtaagtttcgggattcatgtcattattggtaagtgttacaggctctgtgcatgcgctgtatcatgaatatttctgtctcgtacaactcatattgttttaagaattcctgttttagccgggcatggtggcatgtgcctgtagtcccagctacttgggaagctgaggcaggagagttgcttgaacccgggagtcagaggctgcagtaagccgagatcgcgccactgcactccagcgtggttacagagtgagagtccaactcaaaaaaaaaaaaaaaaaacaaaacaaaaaaaacagaatttttattgttgttgttgcttttgtttcatctgtacttatcaccaacacatccccaacctcttcttccactttcaacatctacacttaatatgttcaaattcagcagattcctatcaatttcctcttctgaggatgtctcctggggagccttcagatctgctgtcaacaaaactagcacagtcattatcttctccctcttttcatgtggagcctgggaattcattttttgaaccttcttgaatgcattcccagtttccttgaccacctccacccccaacacaccatgttctcctttcttggctaatttcctcttttaggtagatgtactgagacaggtgcatgggagataaaaattgtgaagttttgtattgtgaaaaagtctaggagtaaatgacattttgccagggcataggaatccgattttgagattggattccatcagaatattttaggttatttactttacgttttttattattattattattactgacctactctgacttgtttcctctctggaaatttggtaggatattctcttttgtcccaatgttctgaaatcacctaatgacattttgttatacaagtccattttcattcagtattcagttttcttgggccctttcaatctggaaataaccatcctggaaaatttcttcaacaatttaattttctccatttgttactccaactttattttctaagttgtctctgacaccttttctttcctagatggttcctgctttttcatagcattctgttcttgttttgtgaatataatatatccttttacttctcaggtaattttaacaattatatatttaagttcttatatcttgcaaattttcagtttcttcccagttgctttaccctatgtgtttattgggaattttgcctttcttgtcagaagatttttatggcagtctgcttatattagaagaaaatgatcgaacctcctgagtgtgtgtgtgagaggagggctagggctgctccatcaccatggagtcactgtcagtaaatcaagcttgcttattttactgaaaaagacccaacatcttttccttagttctttctttctcttgagtggctcagggtccctcactttcttcttgtcagtctagtatgtaagtttggagagccaaggatgtctatattcatgcaaacgattagtttaacatctttattctggtataatccccaaatatgcctaaggtcttctattccaaagacccccagtaatggaagtggaatttgatcctaattccttgtaaaatatacttttgatcaacttttttactctgcctcaccgtcatcctcagtttagtgcaaaaatttctggttctgccaattgctgaagcttttgagtgtaccctgaggcgagttgatttgattcttggctttctgaagttttgcattaggattcttctttcctggttcttttaaatcaattaccactgaccttatgttttctaacttgcaaaattgtattacgctcttgtcttctaccatttaatttgtccttgtgaacttgtgactttgaagtaatcattttgtgattataatgtaattttagtggaattttggaggggagtagataacacatgaaagtattttgtctatcaactcaaaggaagattttgaggtggttaacatttttctttgtaacaaaatctgtcaatgcttacaaattatatatttgtatatataatattgtactatgtgctatattatatatatattatttaacttagaaagagtgttcatatgctgagataggtagaacaatgcattggatggacggattaattattcaggctttctgaatatcatatctaatctataaaatagaaaacattatactttggtcttaaaagtctctccctgctgttggaatctagcattaatgactccactggctcaagcgtgattggatttgtcctaatcctttttagaaatgcctcagagaagtgtgatttctaactgctgttaaaaggagaaccactgcttattcatttacaagttataatcataatgtagattttagacaaaagactgagagtagtacatcaaaagacttcatagttaaatagagacgccatttctataagtatacggcatgtggtgtggctgagtacagaaaggtaggagatgaactgtaggaactgaagaggctgaatctacacagagcttcctgtaatgtgaggtctgactgtgctttcatcttccacttggtgacacctacacgctcctcaaaataatattctaatcacatcccttaagccttccttgagctatttgtaccacctctctctcaactacccctgaggtcaaatatacgattaaacttcttaaaaaataaaagtttgaaaccaaatattttccccttggatattcactaaacattatgtttaatatcaacgcattttgtctttaactgtagaaaatatttttctcatatattgataaactgcatagtccctaatgcttagttttacacttgagaataggtacagcttcttgactagttctcaagtaaataaaacttaaaatgttagatagacttcatttattgcatcccttgcaaaaaatatactatcagaacaatgcagttgttatcaagattaaattagtatacaaatgtgacttttttttttttttttttttttttgagacggagtctcgctctgtcacccaggctggactgcagtggtgcgatcccggctcactgcaagctccatctcccaggttcacgccattctcctgccttagtctcccatgtagctgggactacaggtgcccgcaaccacacctggctacttttttggtattttttagtagagaccggctttcaccatgttagccaggatggtctcgatctcctgacctcgtgatccctgtgactatttctatcagaatcccttcttgatggcataacaaaggtaaaagcaaagcattatagattcttcaaaaacaggtaaagaatcacatatggatccccaaagtctgtcttgacagtaagaacgacatttctacagatcagctgttgcctgtttgtttatgcgggtaaaatttgtcatggatttttttttttttttttttttttcacggggtagtaatacccctttctaacatctagcactgctggattatgaaaattttatccaaggtgatgtttattctctgaaggtaaactcagactgagcaagacacaaaggagaatataaatgtccttttctgtatttcttgtagaatacatcttgactttgtgcctattctctagtatggtgtctgaaaatgatgtttacccatagaaactatttttatttaaaggaacaaaattccatttaacttttactttaacaggaacatgggtagtataatacattttattaggcattcccctgtttctgggtataattttaaaatgcaaagggggcaataaataaggccctttgtgctatagcatacatcatcaatggctgataattcattccagcacagtgtttggcattcattctaagccaaataaatattctatcttcacaactcatgacaaacctgatgagcctcgcaactcaatgtggggcttccacgcacttccgctgtcatgtgtgaatcaaaatgttgcagagatagtgttgatgttctctacaatccgtttaaaaagacacaaactgtgtgtgaatgtaaagaagaattgatataaatgcagatgatagacagtttgtagctcaagacaactaggatatatgaaatttattctatttctagaaagattatcttttattaacaaatcctgaagactatggtaaaagtcatttatttatttatttatttttgagatggagtctcgctctgttatccaggctgcagtgcagtggcgcgatctcggctcactgcaacctccgactcccgggttaaagcgattcttttctgcctcagcctcttgagtagttgggactacaggtgtacgccaccatgcccggataatttttctgtatttttagtagagaaggggtttcaccatattggccaggctggtctcaaactcctggccttgtgatctgcccacctcatcctcccaaagtgctgggattacagacatgagtcaccatgcccagctggtaaacatctaataatattattaagcaaagacttcaataaaactgatttgcttaaaagtctaagtttatactggaatgaggacaaataatgatagacttctcagcatggtaagcacttcacaaagcttaataaagtgacactttataacatatataccttcacacctctgtgacgtgttcctaacataaatttaaataaatgttatcatttaccttatttttctttcagccccaaatcagctagtatagaagaaaagcctgccctgcaattattcctcatattctacttttccttctcctcctcatggtataagggttttgtaggaaagccgtgcattaacgccgatatgtgtaataaacacatctttcatgctaagcattgtactagcaatgcgaagaggaaaactctaaaatctccatgtaagtgtagggaaaatatgtacaaacatttttacaccataatacataaagtgtaatctcaagactgtttatggttatggttttttttattattttatatccctgataatctgatttaaatatatcccttatctatagccatgccactctgaccatgcctgatctcctctgaaacacacacctgctttgcaatcagggttacacatataaagacaggaaattttttataagaaatcttgtaaacatagttatccagggaaacagaataaaatcttgatgttttctttttcaggtcatgcaaacaaacatttttaaacttcggttttcttatccataaaagaagagaaataatacttcagtatacatttttttaaacatttaaatgagattagctattaataaagattaattgctattattataagattatcaactcaacatcaatattgctggtataagaatatcaaattttcttttatgatttaatgacattgaaactcatgtgtatgtttgactatttaaaattaaagttgaaggaaagtcactgtccttacacgctgaattgtgtctccccagagttcgtatgctgatatattaaatgccattgccacaaaatgtgactgtatttgaggataaagcctttaggttggtgattaagctataaagacatctttaaggtgggtcctcatccatgacgatttttattcttatatgaagaaatcgggacacagaaaggcacaaagggatgacctttgaagacagagggagaagacaggtgtctacaagccaaagagaaagacctgaggagataccaaacctgctatcactttgatctccgacttccagcctccagaactgtgagaagataactcttgttgtttaagccacctagtctgtggcacattgttatggcagccctaaggaatgcatacaacttccaacaaacacacctacacacgtgctacctgattctctgattctacctttaaaatatatctagaatcattcaaattttccatccctaccgcctttgatttctgtgaaccacaccacttacctcttactacaagagtctcctcctgacattcatgtctccaatataccccttctgagccattctcaacacggcatcatgagtgatttattttaacacaaattttgtccttggccttggctgttgaaaatcgtttgatagcttccaattgctcctagaataaagttacacaaattgctcggaaggctttcaattatctagtttttgctaaactcttcatctcattcctcaaccaacacatctgttgtatactaggcaggctcagcttagtgtctgggttctcttctgcctctagaatttttattgattattttgtgagaggatagacccctttcttaaactcttagcacagtgagttcacatagaatgaaaaaaaattcttccataataaataattgcataaatgttcttgacgcacacaaaatattgtcatattctggtacaatcactataaaattttcattagacaggcttccatttatcacttcaggaccaacaatgttgagaattaagctgtcccatgggaatatatttattcatgtctaatgccttccttaacaaccattagaaggagggaaggaagacagaagaaaggaagaaaggagggaggagcgaaggaaggggaaagaaggaaggaagggaaaggagggaaggaaggggaaagtgggaaagagggggaaggaaggggaaagagggaaagagggggaaggaaggggaaggagggaaggacggaaattatcagaagcaaaatgaatataacttacacactaaatatccccacatataaaaccaaagctttaggaaagcctgagaaaaaacagttatgtttcagattggaaacaaatattaaataagaagaaatgagttttgattcttaaaatatcaagaggaaaatttagtttgcactgttaatagttcaaagatgtttgggataatatatgaagaagaaaccaaaatatttggatattttgcttattagtcaggatattattattgtaataatataattcagtcaccaatttatcatttaaagaattgctgtgtaaactagaaagagaaactgattaatgataggaataaaaatctagttaatatccatttttaaacaatgggatagatgtaactacaaattggcatttttttaaatctaataagaaaaatgttctgataaattgcaatgatttgggatgttttatttagcatatgttagttttccctggattgggctttctaaactattggtgttaagtcaaatactgtggaagtcctagtcattttcatcacaaattgaattcaatttcaaaaaatattatgggtaaaaaccaaagaagaattttaaatggcacttggcaagagaaaaaaaatgaactgactcagcaaaaggacttcctttgaaggaaactttccaaaggacctctcaaaaagaactgctataactatactgttttcttagaaaagatacgatatacacaaaagaacagctatgtgaacacaaaaattgatcacatatatagaaatgaactattgaaccagacttgacagattgtaacttgaacacagtcaggaacacacagggaccatctttttttagcttccagattttatcactatcttgatctgttagtgataataaaatattcatcgctgagcacaaatgaagctgcctgcctgcaacttgactggagggtcccttgaaataaataacataaaactggttctcagcaagcatcccttttgaaaaatgcctctgtgtgttagcaaaccaaagaactggatgctattatattactgtccactacagcaatagcaaacatgctcttcaatgactctcagcaaaagatgcaaaatgcctctaatttacagtatttcagaagatgccaattccagccagcaagagaggttgaatatatttccataaaaatagtgagacagcattttccttttttcctcttattgtctcacaagtgtgctgtgagtcttcagagactacgtaacatcttatgtagccatcaagccaacggctcttgaaaggtgtgcatgtgaattatttgacttttataatgattagtttgttggactcaataatttgtaagattgtgaagggatcctgacatccaaatgtttgacaaactctaggtttgctttgtgattatttacgaatttcagagaacagaaacttaacaaagaaaacagtcacagccactctttctcccaagtactagattaaaatatcatcaaaaccaatattcagcctatatcaatgaaacaaataaatgtgggcacagtgagaaaccaagcagctgtgtatttttacaacatgatcacagttggttggcttttcgggctctaacttcctttgctacttcccttagttgtctgcttattttgggagaattttcaaaatgtggaacagagaataagccattcataacagatgctgtaaataggttatccatttcctcctacctaatagcattagcctcatcttgcctggaaacagttgcctttaattaattctccatgatgcctcttttctggtagctatgagaaattgataaagaaacatggtctaattttaatcaaaataggacgtgtcagtggcactcaggctaaccttgcaggctaactcagacatgttgaatagagaatgcaaacttcttatgctaaatagattaatgaagaacagaaaacaaaagttatcgcttgtgtttaataatgaaattaaatatattgtcaaaatagagagtattttaaaaggtaattttcactacagaatataacattgtttttccttttaaaaatattatggtagtgtttaatattccatttgtattatgttttctttgatggttacaagatttgatgttaatggaactggttggtttgtaagatacaaaaaagacaactgttaattgatcacatttttataagcagtttcaatataaattcatactgaaagtaacttcttatatagctgtaagacaagagatcacatcgataaagatactgtatttcacgatgttgtattttatataaaattacactttcctaaatttctcaaggaaaatctaagccttataatccaaattaattttccccttacattatgtcagaaactcagttagtgttattttaccttttggatgccttacattattttttttaattaatttatttatttacttgagatgaagtctcgctctgtcgcccaggttggagtgcagtggcgcaatctcggctcactgcaacctccatctcctcggttcacgccattctcccgcctcagcctccagagtagctgcgactagaggcgcccgccaccatgcccggctaatttttttttttttttttttttttttttttttttttttttttttgtattttttagtagagacgcggtttcaccgtgttacccaggatggtctcaatctcctgacctcatgatcctcccacctgggcctcccaaagtgctgggattacaggcgcagccttacattttttttttttttttttttcaggtctctaactgatgggttttccttttctcctggctatgccataaactaaatggcaagatgcaggtttcagaatcatacacttcagagttgagatttacacatttgagttgtggcaaagctggggcaaggagtcagtgttctgatacctgctctggcactttgcctccttacgtccagttctgagctctcagcctcaaaaacaccttctatcaaaaaaacacagaacgcaggaggaaatgcctacaagtgccttcattccatccactaaaaatgtacaaaatctcaggagacatattttgaggaaagtgatggctattttatctaagaaagaatcccctggatcagatcctagattcttagaaattcaagaaagcaaaacaaaaaaaattaaacaaaggaaaaaacatctcttaaggttgacttttcaaagtattatttctatttttcaaagttaaattgtaatgaattcaatatttcttcattttttaagtgccaatttaactagaggaaaaatactaaaccaactagttatctttaattatcagaatacactatgaacagtggctttcatttaatggtatttttttgcccctgaggcaaattctatagagaataaagttaatatattgtgaattatttaataggaaggttaatttatatttaatacaaataatttaatccagtcctgcaagcttctatttatttggaatattaacaaacattgtcgaacactcgccatgcatctttcctgagctgtgggttgactgtacggccacatgcagaaaggacatatgctgcatgtttcagcacctgagacagacttggggccaccaaaaacagagcaacaatgtcttttaccgaccacaacacagctacacatgaagacccctgtgattctaatcctggacccatttcctactggttttatcacatgaaaccctttacttaaactgtttcagtttcagtatcttcctggaaaataagagtgtcctagtggtgctttaaaggcgaatttagcttcattatgcatcagtgtaaagtgttgcataattggcaccctgtgtcttacagctgtcgttatacttatacgaaaatttattacaaacgtaatgaaaattttttgaccaggtagagggtatcacagtggtgtttgagctgcttttaagtgaacattgctgtgctaagcactggaggtaaagaacgaaggaagactctatgcctgccctggaggcgtggacagtccagtgaggaaggtggcgtggatgaatggtctgcattcagtgttgtggatctcaggggagtggcactcatcctgcacgacgatctgcatatagctccctgagctgcctatggaactgagtgggcatcaaggggacaaggagcagaggaagggcatttggaatagtgggaccagcagatgcaagggcaaagggatgccaaacagtgccatttgcaaatgttagaatgatgattttggtgggaagccccgagtgatgcttgagtagatgagtacaaagaacccagcagggcacaatcacttagatgtttgcacactgagctcagtgttctacaggcttactggacattccacagagggccttggagcagaagaacaaagtgatcagatggaaattttagatcagcatgttcatcagaagcaagggtggaagggaggacacctcatcttcagaggatggataaaaggaagtgtggatggcagcaagggcaggtgaaactatgtttatgtgggcaggggttgcaggtaggaggtaaatagttctccctgacctcaatttgcctggaaggatagaagacacatttgattattaaaaataagacaatagccaggtacagttactcatgcctatagtcctaacacttttggaggtgaaggcgggaggattccttgagcccaggggtttgcgaccagcctgagcaacatagcaaaaacccgtatctaaaaccacaaaacaaataaacaaaaattcatctggatatgaaggctcagcctgtcatctagcactttgggaagctaaggcgggtggatcacttgaggtcaggagtttgagaccagcctgacaaacatggtgaaatcccatctctactaaaacaatacaaaattagctgggaatggtggcacatgcctgtaatcccagctacttcggagcctgaagcaggagaattgcttgaacctgggaagtggaggttgccgtgagccaagatcaaacatttgcactccagtataagcaacaaaatccatctcaaaaacaaacaaacaaacaaacaaaaattagctgagtgtggtggtgtgcacctgtagtctcagctactagggaggctaaggtgggaagactgcttgaacccaagaggtcaaggctgcagtgagccatgattgcgccactgcactccaggctgggcaacagagcaagaccctgtctcaattaaaaataataataatagagtagaaaacccatggatggtgttctggacaatctgtaagtcttccccactctaagtatcttcatctcctcccctccagctttgctctcccctagggtggttttgattttctaagcgtgtaaatgggctcagcaccctcactccaggtttcaaatcaaatctctgcccaagagggcatttgggagattgctgatcgccaatgcacaggctcagtagggccgacttactgctaacaaaaacttcaacaccaacaacaaaaagtcctcgtatctcaataaatgggaagaaaacataaaagatttaggcagacagaaagacaggtaatattccttacaaacattgccgtttcatctatttagttctaacaaattataaaatatcccccaaatctacaaacttcccattttcagatctcataggtctcacttacctatgtttcctccaagagagctccaataagtaacagaacgtgtctctcacagtttcaaaaaattattcccagccttgtgatctatcagaaagactggaaaccttcacatttacaagatactgaagaataagcttgatgctgaaattccagcgaccttcaggtagtgaaaaatccgtaattcccaagatggaaattaaggggaaatgaagctactactgttcagagaagtatgctcatgaagcttgtatgctccaagaataccaagaagctaaagaaagatttggctaaacaaaggaaacacagtgatacctatcatttagatagcatttcacggtttaacactgcttttgtatacaatatgccatttggtcttcacaataatcctgagagttattcgctacattttcacacatgtacaaacaaaggggttaagaagctcttacaaacctgtacagaacgagtaactgtactaagaaatggagttgtaacgattcctccactatattttcaccctaattcacaagttttttaaatctccagatctctaaacttctccagaaattgcttaaattttggagagcaggcaattctgatctaataatcttgcaactaaaaacggatacagtgattcatcccatgccatcgacaatacacagaagtgaaacatattgtgaactctattttacaatgactaactgaacatataattcatcatttatcgtgactaacagtaccatttagatattgagagtaccaatcctacaaggaggaaagaaaacatgagaacttcttagagtgtgatatttgctatgctatccaaaataacatcatggtgttaatttgtttataaattatgacattaaatttctctcaacttatatattcaatgatgttccaaaacttctatattcaaagatgttttaaatgtttgaatatataagttgaaaaaaaaataactccatactggaacattccctaatgtttgaagcaacatttgttagcagatatccacatatgtaaaacatatgttaaaaatgatactggtgaataccatcatgactcaagataatcaccagattaaaacattttttatatttagccaaattatagtgatacttaatttactaatacaacagggttttccttctactcttggtataaggtaatgtttcatgctcccaaagatttgctatctttatccacctcattagcctactctacgaggttatgatatttggctgtaggcaaatattagaggcctcagggagaggacagttttctttgggtcaatatttctgcctgctaccataacagaactagtttccctctactcctctgagaataatctaccttgttatttgctaaattcacaagctcgtgaaaaaggagctgttctagatgaattctaagtttagcaacatgttcagacactaaaatgaccatttttattatatggtagaaaaacacgtttttttcaattgctagcttagcagcactggctctgtatttaattgcaaatgagagagaaaacagtaactgattctggccgtggcttctttgcagttattgggtggctgaggtttagggcattcctagaggccagacctgacacaacgtgagattacattgaacttgccaatcacttcattagtgcaaaacaggcttcaacaaagtctcgtatttatttttaaaagcctaacagaggaaaatgatttcttaaattgttgtgctgtttctaatatcatcatttgataatatgattagtagctgacaacacaataggagaaattatttttaggtcatatgttgaagtatttgcatcataaacagaaatacccagaaactatcagatgcttagttttcaaactgattgaaaaaaaaaaaatgctctccatttaggaactagtgtccaattccaacccaatcacacaaacaaaatgaacacaatgaagcaagtttagtgacatgatatcttcatctattaacttgggaaactatggaggattggaattagcatttctagagaaacaaatgcactagcaaatgtgagtgttcaaaacaggtaagtgctgagaatgtttccctgtccacagaacggtgtggtctaaaccctcttatagggttagcactatctttttccatttgtcctcaaagaaatttctccttcaggccacagctttgtagtattgctttttatttccagttcttcaaatctgattcatgggctgctgaaatataatgacgtcttatcccttttttttttttttttgctacagactaagttaattaggtggaacccaggctgaaagttcggatacctttggtaaatttgttttattacaggaggtgtttaatatatggctcatagttaaagctggttaaactaaagaagaagttgatattaagtttatatcaaatctatattgtatacttgtaaggcttagatatgacccacagttgtcaacccctttaactagttgtgatgcccatggcactctgagggtacacctgataccggaaggagagcattgactgtgagttctccaggttcttggcatttagaataattggataagatacacaaagtaacaaaggaaagaaacataggaaggaagctgtgaaaggggggatttattaaagccagaaagcacttcacagggtgggagggggcccaagcaagctgttccagggcctagttacacagttttctgggatttaagtacttattttgaggtccctctcagttaccccttatctggatgaagaatttggtccctggctaattaaaggctggggtgaattggcccgtgttgcagatgaagggatggccagtgcttggcccatagccaatccaaggcactctccctttccatctgagacacggtggaaggaggagggctatagagaaagcagcctttgatcctttgttgttaggaaatggggagacggaagtttttcctttccattaactttagaaagtttgagttaattgggcttaggttccctgcccccagacccagatgtttcccttctgatacagctttgggaagacagcacgaattggccttagacctcctgcccctagatcttgggcttcttccttgattcagcacaaactggccgtaagttccctgcctcaagaccttattctgcctcacactcaccccacttaaacaggataccccacttaaacatgtcctggccatattcattctacttctcttctttcttctgtaattttctgataagggtgtgtttttagaacttaatttatcttttctgttttgccaggaaaaatctgaagtgaagaatcacatttctctagtttcaactgctccatgagcatatcccattctgcaaatggatatccgcttgagggctccagtctaaatgcttcacctcattaccccttccctccagaatctggttagagtctcctaattgttatctggattgctcagctactgttaagtcataaaagaggtgaagacaagcttgttcttgtttgtctggagcttctttttatcaggagataatcagcaggacctctatgtcccgactgtgcggttttacatactcggcaaagagtggagatttcctcattgacctcttccaactttctagagacttctcagacataggagaacaggaatgatggatttaccaggttgtcagtaagagttgcatcaccaaaaagcaacattcgcaatcattcacaatgcagggaaccaggggaattgtgtccctgggagaagctgaaatagaactaaaaaataggctttcagactctatcagtgagtggagtgaagcagagaccccagaaatcatttctaacttgaaaacagaagggaggatagcatttgtttcataaaacgttctctactttatataaataataattatcttctacttttccgcttttaaaatatttttaaatgtttctaaaatacaaagatttaaggatgttaaaaatgtaacttggttaagaatataattacatggcgcagatataatagtttagacacatgtaataaaaggcacgaacccattcattcaattactaaaacactagtacgtgtttatattgagtacagatcctcttttccaaataggacattcatgacctggacaggtataactggaacttgtagagttagacttccaatgctttcttgttgagaactttatggtactcaccattttttgaggaaaaaaatgatccaatatgtcagaaagatctggaaaaatgtcccaaacattatatactatagtcttctttgggcaattgtgacttaatctgggaaaagtgacttaatctacaggttactatatattttttgtattgaaatatatacggtaaactagacggcatgtgagccctgtcaccctcaaacattgtcatcttgaatcccattcagaatttctttattattacattgttattattttttgtggagagacggtctcaccatgttgcatgggctagtgtcaaagtcctcggctcaagcgatcctgcccacttggcctctcaaagtgctgggattacagcctcacaacaccacacctggccacattccgcatttcttaatgaagaacatatatttgacttgtcccaaggaaccaaagtcaacactgattccctgcaggttctgcgtcagctcgcaccatgaagagtttttctgtatgaggaatgcaagggttggaatggcttccaggaagcagagccgttcacaccagctttgaatttgttgagttttcaaaatcatgtcttgctcaatgctcatcccttggcacatgattggccccattgtttgtaagactgaccacgctgtttcttgttaccgctgtcatttgtagacagggtgcaaattttgtaccctgcactaactaggtattcaaaaaaaatctgttggggagtgaacacttagcaacattgcagacacttgagggaggcaattgcatgtatctgcctcccacacaccaacataatggcagtcggtgaggaattcagagcctacatatgatgggtgacatataatccagcctcatactccgctggccaagtcgattctcaaaaaaagggtgatatcgtttggaaacatgaacttggagaaaacctctcccaggaccctcatccactcgaggcagtaattcgcgtagtgcagtcggcacagtgccatagcctctgcttggtgtctgacacatccaaagcaggtggattcattctgataagcttcagcccaacatcgacttgcagagctggcaattcggggttgataatgtggcacagcagactccaaagacgtgtacccaggatgtgtctcagcagtaagtgtagagttaacaatgttgaaaaggctgtttacccagttcctcagacgttgtgatgtgcacagtgtgtgttctctggttaaaacaccacaactccagggaaggaagctccattattatctgtctaaatgtttatatggacacatttttttttttttttttttttttttttttttttttgagacagagtctcgatccgtcccccaggctggagcgcagtggtgtgatctggactcactgcaagctccacctcccgagttcacgccattctcctgcctcagcctccagaggagctgggactacaggcgcccggcaccagactcgactaattttttgtatttttagtagagacgagtttcaccgtgttaggcaggatagtctcgatctcctgacctcgtgatccgcccgcctcagcctcccaaagtgccggcgtgattacatgtgtgagccaccgcaccggccagacacactgaactttaaggaagtcaactcacctcaccggcatcaggcatcttcatcaggtaagagctccgccagcacttcctgtccatccactcagaggccaggagagtcagagatcgggggttttctgggcttttccttcaccctcctgccctaactccagctgtcctcactccaatgactgtttagaaccatcccctcctgaccaatctcttcctcagttaccctcacatgattcttcttctactctccccccctgcccccaccaccaggcaacactccctcacacaactactgaaaaagaaagcacgcatgatttgactgctgcctacctcgaatccttcagcggctcctcctcacctgcgtaattccatacaaagttcccagcggggaaggggaagccttctgtatgctcacctgtctattgcgccccacccttcttccctcagtcctcagtggctgtgctctcctccacactgccttccccacatgctgccctgtctagaatggcttttccacctaccttctggaaagtcccacgcctcatttcaataccctacatgattgcctttgtgctcccaccacaatctgttcctgtctccattagagccctcctccttaggcattttaattagtcatgtataaacctgtttctggataatgataatgaccctaataaataatatcggttccctaatgcagctggacatgtggcatgtagtgcatgaaggttactctgagtgctggctcatgggaaccccattctttgaaatatctgacatcaccatggtcaggtttcagatgcagacactgaagctcacctaggttaacaacccccggcaagccatggacttgccatgtgagatcagagcctgacccaatgtgccgactccaaagccgggcaggaagacacatcatcagaaagacttctctggtctggaaatggtagctgagcttcatggaatcaggggctgcatgtgattcttctcaaagcctcggaggctcctgcagcacaaactctggggtgcaccaggtagaaacccacagaagatgcaccaaagccctgagtagaggttaggtcttaaaaccacgggttccatgattgtttcccatagtctgttctatgacctttacggtaaagaaatatacaagcaggaggaagacttttctcttgaaaaacataacacagatggcatctttgatgcgcgtgacatgctctgggtgaagctcaacttagagtcaataacagctcctgcctaagtcagctgggaccactataactaactgtaagttataagttgctatagactgggcaactttaaaacaaaatgaaaaactcagcaaactatcacaaggacaaaaaaccaaacaccacatgttctcactcataggtgggaattgaacaatgagaacacatagacagaggaagggaaacatcacacaccggtgcctgttgtggggtggggggagggcggaggaatagcattaggagatatacctaatgttaaatgatgagttaattcctgcagcacaccaacatggcacatgtatacatatgtaacgaacctgcacattgtgcacatgtaccctaaaacttaaagtataattaaaaaaaaaaacgcattggctacttggagttctggaggctgagacattcaagctctaggagaccagctgtctggtctggtgagagccttgtgtgtagacagtagctgctcctggaatcctcaccttgtggatggcagagagaggagcgtgccctcgtgtctcttctagtaagggcactcagcccacagcgagggctccactctcatcacctccttgcctcctaaaggctccacatcctaatgccatcaccctgagtttagaatttcaacaggtgcattgggaagggatgtcatgattcagtccctcatgctgcctttggcttgtgtcctgggaaagatggcacatggtcgagagacacagcctgcattccattcccaacatagttcaccatcatctgcacttttcagactacctaacttcacctgtaattaaacatttcatattaacttttttttttttttgagatggagtttcactcttgttgcccaggctggagtgcagtggcacaatctttgctcactgcaacctccacctcccaggttcaagcgattctcctgcctcagcctcccaagtagctgggattacaggcgtgtaccaccacacccagctaatttttctatttttagtagagacagggttttcccatgttggctaggctggtctcgaactcctgacctcaggtgatccgtccacctcggcctcccaaactgctgagataacaggcataagccactatgcccagcccgtaattttcatattcctaaaaaaagtaaagataagctttcacatattcactgagaatttttaaaacatcactccagtttgcatttctaaaaagatacactttggtataataaaaccaatatatcttaggtggtaactgccatagctctgagcaatatttgaacggtatttctacataagggccaataaaaggaaatcttccaatatatttgaaggattactctatctggaatcttgactgtaaatactcagggaactaccatttcaatactaaccaaaaatatttaattctaagtacagatcaaaatccgaaccagatttatgctaaaagggaaataaacaactggtccttctgtctgtagaatcatcctagctcaacacctacagaatggaggatgctaagtgctacactgaaggaataaacaatgctgagtgatgctgagctccaacagaaacattttccaaataacctcaactccaagcatccagccaggccttgctggatgtgtcgtagttgcttcagggaaggtcacttgagaatttcctattaaaataccactttaattggttcattctctttataaattaaatgcataatgattatttgtaagctgacccaggtccactctaatgttcagtaatctacctcttggtgttttgttaaattgtgaacaacaggaaattctgtgatgtggtacacaaagttcagcactgtcacagagaagtcagagagactgatggatgcctttaaaatatcctcaacgctgcacgtaaaaggcacgtgttgctgtgggtgaagaagttaatgtaagtaaaatgaactcgtttgttttttaagggagtgtattttccacattgtgtattttaaggaataaactgtgatatcttgaggatagacaaaatccaggtatgtcctgaggcatctgtcttgtagtcacaggatcggccccaggaaaacagggccatttttccatcatgcacctccctccagcctgcattccctttccccagatgtagaagtctccaagcttcctcagctccctgttaggaaggacatctctaaattctctaacccgtgccattctaactcagtgtctgcagctgtcttttgtgcctggctacctttggaagtaatgtggactctcttatctttggatggcaggcttttgacaacttcagtgccttttaccggggcttagaacttcagctaacagaatttttcacaacagagatatcttctagaaggcagaatttctctttctgttcttccaagtgtaatgaattaacatgaccctgctgaaggattcataactcaggtacaggtaaaacaagcaaacaaaccaaacaacaagcattaactgcaattccaatattcttccagttttccaaatggttagggtgcagataaggagtgtttagcatttggtttagaaccttagggtgtggaaagcagattcagaatgcagattaaaaaggaatttcaaaaaccaacctgctttatctaaaaagatcatttaaatgtgtagtttgcgcacttgcagaggtgttgggagaagacagggagggacagaataaccttaacaatatggattataaatataaaaaaatgtcctgctgagaaacgcctgagaaagagcaatgttttgttccctctcctgtgctttaattacagtctgcaacgtccaaactttcagtaaaagtcttccagatacaggactagacattattttggagaaatgatgcaagagaaattgtgtcccatatgcagacgtaataaaacggttgaggagcctacagctaagtttacgggtggtgccagggtgcaacttgcatccttctcccagcagaagatattaggatccctgttcaccaaatacattagaagagccaatctttgaaagcaaaggaattcaggcaaaatcctttctgttaccataacctcttcttgtaatatcaagtataaatacggtgaagtttacttggaaagctaaaatattcagactactttagaccatgcatgtgtaaatcatttgccttgttatagatcctaagatcaatgcttcaagagataaatcacttatttacagtgagacattaactacaattcagtttctagatcctgctgaccaagaaaaatactctttaaaaatataaataaattctgagacatttgtaattgcaataagatattgaatcacccatatctagtttaacaaacacattatacagaagtgaaccaaatggaagattttggtagtgaaactttatcatagacttataccataacattaaattaacatggggaattaaaatgttatccttgtcagatatgtttctcatggattgtgacatgtagtttcactttgttatcaagaatctgtggcatcattattattatgtcaacattataggtgaaaaaaatccaactgatttcctcaagctcacacagataaattaacagcgggtaaatactagaggaagactgtagctttttcctagtgccacatttcttctgcaaatgcttattttatatgaaaaataattgttcgaagtttttttatatatatagcatgaatcaattatatttccatgtaccttttctattgcaggcacacattaaatattagagggcagagaagtccatttgtctatcagcagagataagttttgcctgcataaaatcaatgggaggtgtaagcagttacaatccttcctgcttgtggtttgctagggggtcattttaacgtaatcaatgtgtttagctcgataccttcatttgactatgctttaatttttttccctttattaagaactttcccaaagtccagatttatatgggtaatatacaggaaattgtatagaaaaatatcaacgataattgtttgaaattggataatttataaaactgtagctaacatagttcttacatctttggagaagaaggaacaccatacactttcaacattattcccactttctcaagagaatgctctatgatggtaatatagaaatacgatggttaaaaatctacttccagttataaatcagctttttgaattgaatatttacagaaatcaggtagacacgtaagcaggaatgcttatgtactaatgtttttaaaatcccttacttaggccaggcacagtggctcacacctgtaatcccagcaatttggccaaggcaagtggcttgcttgagcccagcagtttgggccaaggagtatggaaaacactgcaaagccctgtctctacagagagtaccaaaaaaaaaaaaaaaattagctagtcatggtggtgcacacttgtgttcccaactccttgggaggcttaagtgggaagatcgtttgagcctaggaggtcaaggctgcaatgagtcacgattgtgccagcgcaccgcaacccaagcaacagagcgagaccttgtctcaaaaaagaaaaaaaaaatcctttacatatacacacacacaatagatatatacgtccatagtaatatatacatataatcaaatatatatgcatgcatttttatgggaatatacacacatacacgtatagtgagagagtagggaatgtatgtatgtgcatgtgtatttatggagaaatgagaaattaacatcaaattagacttaagatttttctcaaaaactttatgaaaggtgtatactctatcctcttctcaaaatcttagaaatggtatttgccttcatttttctgctatgacaaggtgaacaaatctcgtagcaagtgcataccatttattacaattgtaaaatgacttgtaacgtgttattaacagtttttgaagggggtatgattctttttcagatgtgtaattaatgtagccgtaaaggaaaatggcaatgttgtattgaatactgaatcttgactgtggtgaccatgccaggaataagataagcagagcccagttcctgctttgccgctaactcagcaactcacccaaggggagctggagagtatgccagaaatgatacatacggctataaagacagagtgtccaagtttgactcagttcatctccgggctcttctcacttccgacattgccccgttttgtgaacttgactgtgtctctttctacattctggaagcaacagtgtaatactctgcagttctaggttccctagcctcattcatgctgttgcctgtgccccgcacttagcagatgagccagtggataaggttctgcagctctgcttcccagtctttctgacatttctgctcacaattgttgaattacaaagcaccagctggtccctcgtcagcagcggcctccacgcaatcatgggaaatgctgcattccgtcacagggtgccctgagatgtccctgctctgtttcctctcttcaccttgcaaggcagctgacatcctttattttctcataacgtcactgcctggaatttccgcttccatcaatccggcagtcccacagatataagaacccatgcagtgggcacggtttcagtgtggtgaccctgtgctctaaaaccctttgtcaggggaaacacagtttttatgtatttgtgtctgaaacaaaaaatgacggaacgtcacatgcaagtggtgaccgtagctatgtggctttcctgactcatggcagcaaactaacatctcagattccatcatctaacccagccaacgaggcactgtggatcctgctttcaagtgttttctgcattactgacagcaaattactgagaaggcagaatccaatgatagctttccatcctcattttgcaccgtattttcagcttgctgccacatttgttttcctaaggaggtaataaataaattggaagaaacactgaaaatacagcaaagagtcaggagtctggcttcacaatctgcgacagctgagggtgagatatacaattttacacctatgataggagatctataaccttagatgccacatctattcaggaagaataatatcaaggttagtgtaagcatacaatgaaataaagtttctggcaaacagtaatgctaaaaaataaataaataaataagatgtttctgttctcagcttcctatttaagttgaaaggatgtagtccaggagtattcagtcaagcaaatgtccatgttttgtgacatatatctctaatctattgtataagtatagacaaaggcatttagcagatgccactttattgcctcaaagagctgaaaatcaatgggtatctgtggaaggagaatggtttaccccaagttcaaaactgtgtgcagacaagagccactgtggagaaagagcagaagccaggacactatgcttctaacgccgtgagctgggccaagaggtgaggtctttggcaataggaatgcatgagcctacaaaaggcctaagtaaaaagttttaaaaaaggaattgtattctagtcccttagttgataacctgagaattctcattaaaaacgtacaaggaaaaagagatcatgtttgtagacctaccttatgcaagtaaggctaatatccccgtaagatatgaatatcactgatcacagagaaaataagagaaagactgaatgttggaaagagaggcacgattataaattagtgaaagctttctgatttgttgataccaagtcagctgcatcacagtccacaaatatttgttgaagtgatacatttttctaaattccaagtctattgacaataatacaaaatgttatattgaaaattaagtgggctaccctaatgctactccagaaacacgactgcaagtttctgcagtgataaacctcatcacagaacctaacactgctgcagaatttgtcctgttccaggcccgatttgtgctttgaactcatgcaatgcctacagtggccacatgacgcgcatgcactattgttcccatgctacagatgagataaaagaggcactgactgtttacataatttgcccaggattgtccttttgcagtttgtaacagagccagatgactgggtcacgcaaatgttgaaaaggggcagcagagaggtgaataagtccgggtgtgaattagggggtggagcagcaagatcagcgtttgggtctcgcattagagtctcacctgcatgactcccgcagggtaaacagccacgctgcttctaatgctctgctgtagatcacattccttttactttataaatcagaacttgcctctgtttggcaggaaccttgtttgggaaatgaaaatatggtaagtatgtgtttccttctagttaaacaagggaaagtatcgttcttaaacgccaaacttaaatggttaaaaaagttaagtcttaggccatgtcttagaacgaacgttcttatctttaaattgtgagtcattttttcagatagagacaaggtttgattttttatcactcttggttagctgatgacataatacacattcaaagaaacgtgacagattttaagcaaatttctaatcaacagtgttctacttcgtcaaatcacaacagaaacattcctccgtgtcagcttttgtcattgatccccggatctttccagtaatttgtgtattaagagccacaaaggggaatacacaaagctgcaaagtcaattaaatcctcttaaataaggcaaaatgaaacaacaaaaaagtgccatcctatagccctctctgttcccagtaagtgcgggaatgagcttttgaggaatgcacagcccaggtgttctgcagctgcacattttaatcatcaagtcaccaaagtctgctgataaacatcaaaaaagcctaatggagtcacagacccagtggcctggttcctcagatgagctccatagattcctacagaaatggaattggaatagggctggctggagttatcagagcataataatcatccgatcctgacattaagagtccctctgcctcacaccacccagaggcaattcgttgtgtgaggggtgtgggaacaaggtttcatatctggactgggatcactgtgatatccttggggtggtagcaaaatctttctttttactaactttttaattatggctaaagagttgatggggttgaaaatgctttctccttttcaatgaaggctctgaacggccgtgcaaagtttatgttctctctggttttgataaaacttaaatgaatgcagaagccaatggcaagtccataaaatttctcaatgagtctctgtactgacttgagaaagaaaggataaatatgctattggtgctaactcttttattgagcatttttatgtccaattctttatcttccttatgtgtaataaagtaagttcctcttatttgacttactaaattcaaattctaaaagatcacttctatccacatacccaaaagcattcagttagtgacaatattaaaaacaatgggaaacagtagtttttgctatttggtgataccaggtacccatctgcttgtgatttaagataattttctgtactgtcaggggcccaagaagagactatgtgcagtttgcagtggggccagtgacagcttcaacctttgaacaggaaatccagacagtacagacttttgggaagggcccaaattacagatcccagcagcgagcagcaagtactatgaacacaatcacagggaggctttttaatttatctgagcttaagtctcctcatacataaaatggagtgcatttttcttacctctccggacatttgtgagggttacgaaactttatctatccaaccaactttgcaactgcttggcagatgatgcatacatcccagatgatattaagtaggggtggtggccaggcattgaggggcatgttatgcacacaaggagcctgtagaccagaacagggatggacccgccatggccagggtgacaaatctcactgcctatcttgtggaaaccctaagagtgtattttatatttttaagtggtagaagaaacatcagaagaagattttgggacaagtgacgatgtatgaaatttacatttcagtgtccacagaaggagtttataagaacacaacagggcccgtttgtctacatcctgtctgtgactagtttagtgatgcaattgcagagctgggtcactgcaccagcaactcagggtgggcagagcccaagatatttaccatcattttctttgaagaaaatgtttattcacgccagctcaaaggttgaattgaaaattttctattttcgtcctttttctttctctattttcccctacctccttccctccctccttcacttccttccttccttccttctgactagcggagaaagaggctcaaagaactggttaaagcagctctagctacctctagtcaatgactgtgttgtcattcccccgtattgctaagaccctctgccggtcatgtaacaaatgcaaatctttcacgcagagttgattttcagaacagctcagacctctgttatctgggcatggggtgagggcatcccctcacgcccaaccggccttgggtgggtctgcacagttgtccctctggccgtccttttcctaggagtcagggccagggctgacctgcctggtccagcgttcacagctgggtgaacttgcccagggccttggtccagctttagtcagtctcctatcctccccacaggaaaacaggatgctgaagttgggcttggtcctatcctccccacaggacaacaggatgctgaacttgggcttgtccctgaggttaagcaagctgtaaggttcagaacatcttttagcaacgtatgccgagattggccaactgttgctaggaccctttcctgctcaactgcccccatacacggaaccaatgcctgctcaaagctcctgctacccctacccctgcttccccattacaatacaagaaaacccttttttttttttttctgtttgagcttaagatccctgcagtccctgaggtcagaccattctccctacggccttcatcatttttagtgaagtctctcctttcctaagcccagacatacttattttggcaccattgatgctaggacggaggatcatgcccccatgccagctctgcagacatcgggaagactaaacaacagaagtacatgtcaagcccttggaggaaggatgcaatcatctctactgcaaaaatacattgcaaagaaaacccgaaagaaatagtaatatgaatacagccactagtgcggtcatcactattgcaaaaggatattgcaaacaaacaaacaaaaaaaaatcaaagaaacagtaatactaatacagccgctagtgcagtcatcagtatggcaaaaggatattggaaaaactcccaaagaaacagtaatattaacacagccgctaggttgtgtcctaggttcactatgacagaacagtcctcgttcccctccttcttatttttctggcccagaaatgataattttcacagtggcgttgctggtggtagtggaagatcaacgccgtaataatgagtattatgggccagcagctattcctaaaccaccccattcagtccttatcacaaccccatgagaaccaccatcatcgtcacttgatgggtgtgaacactgaagtgttgggattttagaactttcccaagtttatcatatgggatgatgtagaatccaataataggaagtcagttttcagaatctgaaatctcaagtcctcagtttactactgtttccagctgaaaagaaagattatctttctataattattatttgttttttgagacagtttcactcttgttgcccaggttggagtgcagtggcacaatctcagctcaccacaaccttcacctcccagattcaagcgattctcctgcctcagcctccatagtaactgggattacaggcttgcaccaccaggcccagctaatttttgtatttttagtagagacgaggcttctccatagttggcaggctggtcttgaactcccaacttcaggtaatccacctgtctcggcctcccaaagtgctgggattacaggcatgagccaccgtgcccagcccgtaattctttattgatagataaccgtgaaatgttttactcattggggtagcatttagtgtaagtttaatttatacctcaagtattttaaaagctaaattaatgtccattattagtactcaaatggaggaaatatttttatttgtgattcagtaatcccactatgtgatatctaccgaggggaaaagaagtcattatatgaaaaaggtatttgcacatgaatgtttatggcagcacaattcactactgtaaaaatgtatccatcaatcaacgagtggataaagaaactgtggtatatatatgatggaataccactcagccataaaaagcaatgaattaatggtattcacagcaacctggatgggattgcagaccattattattattattgtgagacagagtctcactctgtcgcccaggctggagcacagtggcgcgatctcggctcactgcaagctccccctcccgggttcacgccattctcctgcctcagcctcccgagcagctgggactacaggtgcccgccaccacgcccggctaattttttatatttttagtagagatggggtttcaccgtgttagccaggatagggagaccattattctaagtgaagtaactctggaatggaaaactaaagaccgtatgttctcacccataagtgcgagctagcctatgaggatgcaaaggcttaagaatgatataaaaaactttcgggccttgaggggaaagggtgggagggggtgagggataaaagactaccaattgggttcaatgtataatgctctggtgatgggtgcaccaaaatttcagaaatcaccaaagaactttcatgtaaccaaataccacctgttctccaaaagtatggaatttaaaaaaaaaaagaaaaagcactgaggacattaaaaaataacgtcttaattccaagtattaactttgaaaattatgatttactgactaagacttaaggggaagtatttgtcttttatatagcaaaaatctggctaattgttctttctaaagtctaactttatcataaagtaacacaaaacattctgattcttggaaagtactgaatttaggaaactctccagcaacaagcataaaaataaaataatgattgaaaaccattttttgtaaagtaatgaagccaactttggaaatttggtgttatgttgacatatatatacgcaactttaaattcaatgaaatagtccagaataaagaatatatttcaataaagtaagtgttggtcatgtgtcttcatgaggtccgaacatcggttgaaagtcagacaatcattatgcttaagcaaggaaaaggagattttcaggtgatttaaatatccacgtttctcatcttgcatgaggctgaagcctccatttacacactgtggatgtccccactttcttgcagacactctggaagtctttgtacttgtgtgtgcacagacacatgtccacgcaatgtcccacactccatgtcttcactcttgccttgtggcaagttgcaattattttctataaggtgatactacatttactcagtcacacttggatgaaagcatcattttacccgtgaaggtggtgtactgtaaatatcagaaaagaagaagaaaaggaacttgaagtttctaatatttccttaaggagaaattctaaaaaggacatactgctgttgttctctgctgaacaagtggtttaatattacttgaggccactgcatacctcatcagatgtatttatcagttgatataaaaattgttaattattctttggtgatcactttgtccttcttcttctggtttgcattaaatcacggcacttcttaaaaactgagcagtcccagatttgcaggaaatgtaaataatgtaagagatacatttccaggaaatataaacaaataatgtaaaaaaaaaaaagtcatgtcttaagacatgataaaagttcagaaggatgaagtacttgcaatgtgctacttcctatctcatttaattccatgaacaaccctctaaagcaagcactcttaccatctgcatttacatgtgagccttagaaacattacataactcaccagctacacataattgataagaaacagtaagtgacagaattagggctaaaatcccggtctctttgactgtaaaaatgcaggctttcagccacagaattaaaggaatcttagaggtaaacttgtcattcctccttaattttttagaagagaaaattgaaactggaataagttgaatggcttactcaaggtcatgctgctgttgagataaaagaaaaaggactgaacccaagctgaacacgcaaagtccactgtgcacctcctactacttgacattgttttggacagagttcatcaagcggtacattttgatctatacctgttaaaaatctaaatttaaaatgtcaaaagtttaatgtgttcttccaacgtcaacaacagccataaaaattattacaatttagcagaaaaatctgccacgaatcataagaaaaccattgctgccatcattttttactgattctggaaccagtttcaaggaatcagatattttgaattgtgcaaaagaaacaaaatttgttcattttttcataatctgctatatgatatgtcactgcatttttttctttgccatagaatttaattcttttagattttataatggttcagtaagtcaagacttcatcagttcatatccctttcgtttaaatattcagtaagtatagtacacaacatacctttaaaattaatttctttatggtggcattgtgcctttgactaaccattctgtatttgccttcgactttgctaaactaagcaatttcccttaatgtcaaccttgataagcaagtaagcattaaggcaacatttaaacactgaagcaatatatggttacatgattctaaataaactaaaccagtgcgacatcgtaattagtttccctgcctgctttgcgcaacttttctttccaaaattatatgcatgtcttttaattgttatgttaccagtattcatctaagaaacattctgcaataaaatgtagcagattttccaataataaagtttgctaaagaaaactcagcaaagtttaatggatttatgttactacaaaagaaaagtgcttgtttttaggtaattttgatgttcaaatgttttttggttttatcttgacagtaaatctttgaggatatagtgtaactgataaaataataaacagaatagaggtgaattcaagacttacacaaaatttaagccagtttgatgaacagttttgatcctcataaatctaacttgccagaatattaaattttgatatttttaatttattttacctaagttactttgattttttaaatatagattttatattttaagagcagtttttctaggttcacaaaaaacattgagtagaaggtacactgatatgtcatgtaacacctgctcccatacacagagcctccccaactatcaacatcccacgccagagtggtgcatttgttccaatcgatgaacttacattggtaagtcattatcatccaaacccccagtttacaatagggttcactcttggtattgtacatgctatgggtgtggataaatatataatgctatgtgttcaccattgcagtatcacactgagtagtttccccgccctaaaaatttccctgttgatttccccttcctccaaccctttgcaaccactggtctttttactgtctctacagttctgccttttccaaaatgccctagagtaggaatcacaaagtgggtaaccttttcagactgacttctttcacttagtaacgtgcacttcagttcactctatgtctttgcatggctttcggttaattttgttttagcaatgaataatattccattgtctgatacaccacaagtttatcatttcacctaccgaagtacactttggttgcttccagattttggcaaccaagaataaaccttctaaaaacatcccttggcaggtttttcagtacacgtaagtttttagctccttcagataaataacaaggagtgtgcttcctggactgcatgttgagagtatgtttagttttctaagaaaccacccaattgtcttccaaagtggctgttccatttcgcattcccatcagccataactcagagttattttactccatatccaagacagcaatctacattgttggtgttatggattttggccaatttcttttttcttgtttttacgtttgtattttaatgtgtgagttacttttatttagattttatccttcaactcacagtacagacattgttttgtgaaatatttaatattaggtaaagctacagcatcatttggtgtgaattaaatctagctagataaaacttcctgttttaaagtgagtgttttttcaaaactctgttgactatctacatatggtaagtggagtaaaattcaaggaaataattttaaaacaagaagtaacatataaataataaaatttttttatggtggatgtgatgatcttgattaatcagtagcactaatactgctaagcttacaattttggaaatgtaatgacttattcaacagtgtcattacattttaattttctacacctataccccttcatcattaattcaaaaattactactctaaataccatgccatgaaaagagaaacactgggtttgaatcaaggtttggttactcgttaggtgactttccatctgttatataagttttccaggcttctcaaattaattttagggtggtgatgtgggattgaggaataatcgtgaggagaaattaaataagcagagtaagctgttggtacatgtgtcattcccttctcttctttataaacattacattaagaaaactccaatacttatcatgtttttaaagaatacttttaaattttattatacctgatagtgttctcttaaaatgtaatcattagattatatgagtttaaggaattaatacaggatttttggaagaaaaaaaaatgacaaaaatatttgaaatatacaaaagttagaaaaaaacaaaatgatgttaaaaaagattaattttctttaatggatacaaatgataaatatagaatccatctacatttaaaaacatatctaaatagtattcataaaacaacagtcacacactgtacttgttggacagagaacacttacacattcaggtaagtgatgctaatatccttgagggttgcaggtgacctctgaaacagcctggcatgcttcccagaaatgaacccctaaactaatcaaacgcaatgccagctaatcctaccaatgtccccaggcgtaaatctagatataagctgttgtataagccaccaagccccgcccaaaatcttcttgaatgttttcatagtagtaatttatttaggtaccttattggtttacatacttctgtgattgagtccctcacacaagacacgattgaattttgagaatataagattttaaaatatgttgctgaggtggaggaaagattcaagtactaaaagtatttaaaaaatacagtttgtgcctgtagtcctagctacctgggaggcggaggcaggagaatggcgtgaaatccagaggtggagcttgcagtgagctgacattgtgccactgcactccaagcctgagcaacagagcaagactccatctcaaagaaaaaaaaaaatatatatatatgtatatatatagtttgatagtagtcctgaaaaagagacttcattatctgtttcaactgagcagtaggaatttttataattattgtagagtttcctatgttcttgtatgtttttgtccatgacacctgaggtttctgtattggtagaggctgtgtagacagtgaagtttaggtgggtacagatgtgtgtttagagaaactaagaattcatgtgctggtgcatgcatgacaggtatctatatttcagcctccactgcttaatatgatacctacgcctagccagtaactatcagcaacccaaagagctacacaccctccaggtgtcactgttcttttcaaaaggacatggaggtctgttgcagcgaaagttacagctgttgatccactcggttaagttctgtgtgccgggtatctcagctgtagaagcgcaaacacgtggtgtcccacaaattccttaggactctaaaacaactcttactaaaagatgtgccatttgtagaaaatataagcatcatgttttgtttgaggtggtgtcatgctatgtcgcccaggctgagtgcaatggcagtcattgctcactgtagcctcaagtgcccaagctcaagtcatcctcccacctcagcctgccaagtaggtgggacctccggtgcaccaccatgcccagctaatttttaaagttatttgtagagacatggtctcactatgttgcccaggcttggcttgaactccttgacacaagggatcattgaaccttggcctcccaaagtgccggaattacaggcgtgacccatcacacccggcccaagtatcatttttattacaagtttaatcactaagcatctcatcatttcttcctggtcatgccatgaggtgttagctcacgtgttgtcactccagccgcattatgtcactcttactaggttgttgcaaaactaattgcgttttttgccattgaaagtaaaagcaaattacttttgcaccaaccaacctgtgcctagcacagtatcagatatatatatactggataaactatcattactcttactcttcaaggtgtcactgtaagtaataacaattgaaacaaagtttgcaattatgggactgtacatctctttatatccttttcttgaccttatttacatgctcacactttaataagtgaattcccaatcttgcattaattacattcttaatgatgaggtcatagagcagcactgtctgatgcaaacataatgtgaaccccataacattattttaaatttgtagtagtctacttgaaaagcaaatgcaaaatagtcagttttatgacatatttcatttaacccaatatatccagattatcatatcaatatgcatttgatataaaatacataaacataaaagttcttaatggaatattttgtattatcttttttgtaacaggtctataaaagaccatacgtattatacacctacagcacatgttatttggatgctaaagttcccacaattaaagataaaatgtatatataccacacaataatagccataacatagaatgaaataacatttgcagcaacctggatgaagttggaggccattaccctaagttaagtaactcaggaatggaaaagcaaatactgtatattctcatttataagtgggagctaagcaatgaggatacaaaggcatgagaatgatataatggactttggggactcacggtgaactgtaggatgggagcaggggacagaagactgcatattgggtaccgtgtacactgctggggtgatgggtgcaccaaaatcaagaaaatcagctctaaagaacatatctatgtaacccaaaaccacctattgccccaaaactattgaagcataaaaaaagcaaaatgtagccctaccaaaatgatcagggtgtgtttaatgagacaatattttacactacttatctttttaaaatttaaatttgtttcaatgaacaacaaataatatttaaaatgtatttccttagcagcagcagcctcattttgaatgctcagcagccaggtggggtcagtggccaccatgtcagacagcacatgctgaaggcactgtgctttctgcctgcccctgtgctgggtgtttgtgaaatctttttgtgtttcccaggggactgctagaaaacagcaacaaacggggaggagaaaaaaacttagaatatctgtagataaatgtaaaaccctcaacttcccatataaacccaagatgttacttaggtgacatttttttttctacctacttctgaagtagaaaaccagataattttttccagagggcctgtattttaacttggaaaatcctgattttagggaaggagtgtcttcgaaggtgagaaaaacagtttttccttgcagtttagaaaattcgtgtctataacagaaagcattcttacgtaacttagaggtatctaagtaagactttgtgaagggtgcctggtgacacttcaatttaaataacaaactatgttaaatttcataggctaaagtgttcatgtaaaagaaatggtaatagaaatgttaacacactggaatagaatgacggtggctgagagactacattagaaaaattaaacctataacattttctaaaatgtatgtagctacctctgatttatataaaatcttgcttgttgcagaaattagcagcaaaaattcaaccatttaaggatatgcaaatggcagaaaaaaggatatgtgggggacagataaatccatctgtttggaagatacagattggccacataaaaagatattggttatatgatcaatttaaaatgataaatagtcaggctgggtgcagtggttcacacctgtaattccagcacttttagagaccaaggcaggaggattgcttgagttcaggagtttgagactagcctgggcaacatactcagactccatctctaccaagaattatatataaaaaggccagacatgatggcttaggcctgtaatctcagcactttgggaggctgaggcaggcggactgcctgaggtcaggagttcaagaccagcctggccagcatggtgaaaccctatctctactaaaaatacaaaaaattagccaggcgtggtggcagactcctgtaatcccagctaatcaggaagctgaggccgtagaattgcttgaaaccaggaggcagaagttgtagggagctgaaatcgcaccactgctctccagcttgggaaagagagcaaggctctgtctcaaaaataaaaaaaaatatacacacacacacacacacacacacacacacatacacacacacgtatgtatgtatatatacatatacacacacatatatacacaaacacacacaaaaaaattagttgacatggtaggatgcacctgtactcccaactacacaggaggctgaggcagaaagggctcccttgagaccaaaaggtcaaggctacagtgatccttgattgcgccactgtactcagtcttggtgacagagtgagacccttactctctctctcaatatatattttacatttattttttatattttagtaatattgcaatataacgtatttttagaaaagggatgtggtaaaagtagaaaaaagggctctaacatgcaacactagattaaaataagttacagacacagaacacaacagtgagcagatgagaagcagaaggacaatagacgggctttgcagggacaaaacgctaccaacatgtgtgcaagatgaacatcttagatcatcatgttttctactctggagtacatcattctcacattttttaaaaaatgctgttattaattcttttttaaaacacaaaaaaagaacccaactcttagacctcattggctattcaagttaggctttatttcttttccttacaataaaactctcctcttccctttcattttcctttgaactaacttcattccggctctctgttgtcttcagcctccaccacagttgctttagacacggtgactgatgatatcaggactgcttatccaaccgccagtgccaggccttgctctgtttaaccttggcctttgaggtacctgatcatctctgctatcctcaggccgttctcctcattttcctactatcttatcagccgcttactcttactctgttccagttgctggtttcttcttttctttctgacctctggatgtttctccctacctgtaagcctgctggcttagtccttgaacctcttttctcatccctgtaagctcactggtggtgatgcccagcttaatggtgtaaacaccgtctctacggtttcagaatgttaacatagtgtacgtcaccaacacatgtctgagcaaagtccagcagtgttctcaatactgcacacagatgtctgatgggtgcctcaatcttcctgagctcaaaaggcaactcctgatccttcctctaaagctggtccctcccatgtgccttcttccatctagataaatggcgactgcgttttccacttcctcaggccaaaaaacatgaggcattgtaaatactcgtctttttctcacatcccacctttaatctttcagctagttttcttcaacatatcccaaatctgactcaattctgaccacctctactgcggccttgtctccattttctctcctccagatgaaatggcagcctccaaactcatgttacttttctcatattttgctcttctcaacacaggcattagaagaatcttgtgaaatatgagaaaaagtgcatcagtcccttgctgctgcagggacgccatgagagccaacgccggaagagcacactcctggatggctccctgccctgtgcatggcttgctccctaccccattctcacttgtggaggttcaaacgcccccttgaggactattcatgggatgcttctttaccgttaaacgtatcttccttccaccagcagcactttctgtctgcccttcctgaattatttccatagcatgcgtcatcatttaggatactgtgtaatttacttctgttttctatgagtacctgtttccactattattatagaacgtaactcagaagagattttggcttgcgtgtgtgttttcctccatactgtatcctttgtgcatagaagagtgttagagcctaagagatcgtaaaatcaataagagattaaataattatttgaatactcaaaacctctaggtaaggaattgtgggtgagtcaaagattaaaaatatgtatccctaacctgttttctccctccaggggcttctcttgtaaaagttacccaaacctccttgttgataagagtgaaggacctttcacagtccacgcgtttctctctgcagaactagctgttatctcttctctttccccatctctctttctctttttgaattacccccttgccttgggtagagtctatgaatttaagcatttgcgtctcaatgatataaaaagtaacaaattctgtctcatttcatgcagttccgtatattcggataatttatgaaaaattgaattcaagagccacctgtgaaaagcatatgcatgtataccttgaatttaaaatgttcaaatacttcccctttttcctaatctataggtgcctctacttccttctgactgtaatgagattaatgaaatgttattaagtagaggtaaagtctatagtcggagtattggaatatggaacatggacaatggatgaaaaccttagcagtacactttcaaattctgtttctacaaacatgaattctgggtggaaaacatttgttttattacattcacttaagagaagtagaataagttggaggagctagaactctgacaaaagtaaactgatatagctagcatgtggatttttttttttctaaattaatactgtttagaaaaaggtagctaagggacacagaatttcaaatggttctgtttggggattacctatgtattcatcatgatcttctctcatttataacataagcatgaattcctgtaacatttttactcctttccaccctgcaaagtgcattcaaatcacttttcccattcacttattccaatgcctgtacaagctgtgttacgcaaatgtcattatcccagggctgcagttgacgaactgagactgtaagttcacaccttcagcatgggataatggccttccatatgcagaatgcaccgatctctccatcctcatctgtcagtgttcccctccacggtgcttaccagagtccagctgtactacctgcccttcagcacacaaaggtgaggtatccatgctcctgcttagtgcccatgctgttagtttcctctggatcaaatatccatcaccatcacagacctgtgtgaaacctacccgcaaaggtccagctcaaccgttcacttgtccatgcagttttcctaactcattcattcacctggcatttattgtaagcaaccctacgccaggctgttttccaggtgtagggattacagttgtggaaacaactccttaccttccttgaattttctctacaatttcttatggtatttattgtgaatatttgaccctattaattactttgtaatacaatcaatttatgcatgacttattggctctcctgaactaagaaatacataagaacagatgcatatgtgatcaatctttgtactctacagtttctttagttgacacttaacaaatgtacaataactactggatatggagtgatacgttgccaaatactacacaattccttaggggacggtcccactaaatttcactaagccaaatcccaaacttgcctgtttttttcccaatgcagataaactggtagaatatttagaacaaagttaatttgcttattctgatatttatgtgccaagcttctgaaattttcatctttttattttattcttttttatttcttggctcacaatccaatttacttgagtaacttcattcattagacaaatcatctaaatcccagtttaataaaaaatgcccattatgtgtgattctctcattacttacatcaaatacttgaatgcaattgtctgcatgtttttacataaattatgtttctcgcaatactctagattttgtgttctttcttgcataatgtaataatcagcatccttcatttgaatatcacggtttaataccaccaaagcagcacataatattttcaaataaaaggaaacacaatgcacgatgcttaaagtatctctttctcaggggaaggcgtatcacggagagtttatcatgcggatcatttcagtaggtgcatgactacctaaaatttgaaaagatggacctaagagaagtgtttgtgccttttaatgagaaaaactctacgccatctaaaataaaacactggaccaagagaatagggtcaagtctgcactgaacaaatgaatgtctggaatcctctttgtttcctcttgcaatgcagtaaccactgagcaggtgtggctaccgagatatgactagtgtcattgagaaaataaagtttaaattggattacctataattaaatcaaatccaaatctaaatagccagtgggtctcatggctcccgcgttacacagcatagtctaggtttcccaggtgttgtgttacaacagacactatcttattcacatgacaattaaaaaaaaaaactgaaggatcaacaatattctctaactatttctgctttgcttgcagtggaaagtgaggctccacaaatccagaactgtatatatggtaaggaacatctaactaagctcatggaacccaccctcctggtatttatgaactcctgcggtcctcccttaaatatgggctggaccaggtgtttcacacatattcattagaatattgcaaaagtgacaggatatcacttgacattaggttgtaaaaagactgtggcttccacctctttcttggatcccttacccacagagaagcctatcccatgtctttaggcagcccctggatatgtccatatggaagggactgagggctgtccacagccgtgtgcgtaggcataaaagggagcccagcccattccaggagttgagtctgagtcccagcaacaagttaacagcaacttacagaaaaacctcgagggctgaggcaggcagctaaaccatgctcagattcctgacccacagaaaccttgaaataataaatgcttggtattttagcccctaatattgcaagaaatttcctgcccagcaataaataacttccatcttaatttcagggaaaggttgtatgaaccacacggaggaagtaactatacagtgcaacaagtatagggttgctagattgattataatagcgcataaaaatacaggatgctcaattaaaagtgaatttcagataaacgaccaataactctttaatgcaagcttgtctcacgcaacatttggaatgtaataaaattttaaaaatgttctttgtctgagttccaaattgaagtgggaaatttgtgctgtatatggcaaacctaaccagatattcagtatgtggtgatgctgaacagaagatgagacagaggcataaagagaagtttgcatttaacgtggtgactacagaggtaaaggtcaccagaggacgttactgaagcacagaagaagagatagtaagttggatctagagacacagctaagtgctctcggtagatggggataaacaccatcctcttgtggtttacaagaaaggagaaagataaaattatcaaatgatgtaacaatatgattcgctgggtttaaaagttattagatacatagctttgtggaagttcggaaacactgaatgccacttttcagacccaaaactgtgataactgtagtaggaaaatttctgaattactcaaataattcagcaatcaatgagaaaattttttgtcattaataaaaaacttattttcaatattaaaagtaactcattctatgactcaaaagttagtggtgaggtgcgcttgaggaacaatctgatcaggcttctcagttcttccctacttcttgggaagtctcttctctccgggtttgaagtggcagctgaagttctgggctcagtacacatggctcagggtatgaactagcttcttccctcagccttgaaacaaaaacaaaaaactttctcctgactggaagcaaaggatatgtgaccatgcctggatcaatcaccatggccaagggaatgccctgagttcattggtttaggcctgggccacctgcctgcttatgatccaatcaacatcagggagactcacagagtggagggtagggcaagcctggaaagggagggtcacccaccaaaggctcgtggctgcccctagaggagaatgttaaactactgaggaaaacccagagcctcagcagctatgtgaggacaccgtcttgaaagcaaagcgctaaaaaggaaatgaatcttcagcaagaatagaggctaagtatttcatcatttttaaaggtcatccactacatgacctaggtattattcccgttttacagattaaagtgcagtctctgagagagcaagtcatttgcgcaaggcctaattcctttaaattaagagaaattgcacttcaccgtgtatgtaatctcctgacaatggtttttctattgtttaaataataggtttggaaggttattaaatctttgagaaactatgggtatatataataaatgacccccatgtccacccacctctcaaaagagatgtttttataaatactgcatgcactctggctgggatacacaatgtctgaagcctcttttataataattaaaacaaactctaagacctgggaatgtaggaattataggaaacagacccatgctaacatgctcaaagaaaaaaggtgtctagaacactgaagagagaggaagagggatgtgaggaagagggatgtgaggaagagggatgtgagggggaggggagggagagagacagaccgacacagattgtgagagattcagattagtttgtgtgccagagaaattacaccttcgcctcaaaatttcagataaaatattgatgttaatgtacactagacatctcagccacactctgacatctttgcagaactgatgtcaactccttaatttaatattgaagtctttaaaattagtattgatggctctttgagatacttgctgaattggaatctcttatctcactcttttccactttaagtatattacattcctttctaagtgaaccctgggcatctttcactgacttttactttgcactttcatagacaaatttctgccaagaataataatatctgaggaatagtgtaagacctcgaccatcaagaaagatcattgttgaaaagtgatttttaattacttcttactggggaaaattgagctcaagtcactaaggtgatctcacaatgtcaaccaattaaatgaaaccatttatatttaattatctctgctgatgggtcatatccttaggacagtgaatcttccattgtttaggttaaagttatcttcgtcacttttttctaaatactttttaacagtgttgggctctagtctgatcttctctcttacctgcgctatacttttattgttcaacggaatatgtttaagtaattgacatctttattttatgatagcaaaagcatccaaaattgtaaatatattttcttaaaacattacacaaagacaactgatagaagcccaatggataaatgtagacatgataaaaccagcccttagattttttgaaaggtatattaggagagtaaatatacaatgatcacgcaattatcacagcataatttgtgatggcaaaaacttgaagtcagaactatctaaaggtaaagaaactacatatacataatgtcctcacagaagggagaattttattgtccaagagaatgttgcctagaaaaataatggtgaaatattaagttaaaaagatataaagtcatgaatactatgatgatcatggcaatacaacagcatatataaaagtatgcagagtgaaagtaactggaaagaaataaccaaaatgttaccaagcgagtaatggggtccagttgatttctagtcctaattaccacttttctgtgtggtcactgtgcaggtgctgtcgacattggtggcatggggcagctgggcttctctcattgtattctctgtccttgagaggctagcccaggcttctcgccatagccatttcagggttcccaagaagcaggagcagaaaagtgtgacttagatgtggaacccttgcagaatcactcctgctaccttcttgtagacagaaagtctcaagggcagtccacatttataggggtggaaaagagactctatgtcttgatcagaagccctgcagaaccacatccaccctgttggatgtggctctgtaggctatatagcttatgtacgttcttatatacatttggtagattagactgcaaaaaatgagaacaaaattctatagcaagtgtccatcttatctatattgtttgctgacgtcaaccttttaaattgaaaataaattagtatgacaacaatctacactcttaagcctcttattctcatttttcccttttctcttatttaccatgatttttaccttggaagctttcctttcctttttgattattttctcatcctggcaccttctaacctcctcactcactactggttctataccttcactgtgacatatcaatcaccattctgatccctactaatataccccattttggcagtagaagtaccctctagtagaagggacataggagtaggaaattctaatccataaaagacacagactggcaaattggataaagagtcaagacccatcagtgtgctgtattcaggaaagccatctcacgtgcagagacacacataggctcaaaataaaaggatggaggaagatctaccaagcaaatggaaaacaaaaaaaggcaggggttgcaatcctagtctctgataaaacagactttaaaccaacaacgatcaaaagagacaaagaaggccattacataatggtaaagggatcaattcaacaagaagagctaactatcctaaatatatatgcacccaatacaggagcacccagattcataaagcaagtcctcagtgacctacaaagagacttagactcccacacaataaaaatgggagactttaacaccccactgtcaacattagaaatatcaacgagacagaaagtcaacaaggatatccaggaattgaactcatctctgcaccaagcggacctaatagacatctacagaactctccaccccaaatcaacagaatatacatgtttttcagcaccacaccacacctattccaaaattgaccacatagctggaagtaaagctctcctcagcaaatgtaaaagaagagaaattataacaaactgtctctcacaccacagtgcaatcaagctagaactcaggattaagaaactcactcaaaaccgctcaactacatggaaactgaacaacctgctcctgaatgaatactgggtacataacgaaatgacggcagaaataaagatgttctttgaaaccaacgagaacaaagacacaacataccagaatctctggggcacattcaaagcagtgtgtagagggaaacttatagcactaaatgtccacaagagaaagtaggaaagatccaaaattgacacccgaacatcacaattaaaagaactagaaaaacaagagcaaacacattcaaagctagcagaaggcaagaaataactaaaatcagagcagaactgaaggaaatagagatgcaaataacccttcaaaaaattaatgaatccaggagctgcttttttgaaaagatcaacaaaattgatagaccgctagcaagactaacaaagaaaaaaagagacaagaatcaaatagatgcaataaaaaatgataaaggggatatcaccaccgatcccactgaaatacaaactgccatcagagaatactacaaacacctctacgcaaataaactagaaaatctataagaaatggataaattcctcgacacatacactctcccaagactaaaccaggaagaagttaaatctctgaatagaccaataacaggatctgaaattgtggcaacaatcaatagcttatcaaccaaaaagagtccaggatcatatggactcacagccaaattctaccagagttacaaggaggaactagtaccattccttctgaaactattccaataaatagaaaaagagggcaccctcactaactcattttatgaggccagcatcatcctgataccaaagcctggcagagacacaaccaaaaaagagaattttagaccaatatccttgatgcagattgatgcagaaaccctcaatacgatactggcagaccgaatccagcagcacatcaaaaagctaatccactatcatcaagtgggcttcatccctgggatgcaaggctggttcaatatacgcaaatcaataaatgtaatccagcatataaacagaaccaaagacaaaaaccacatgattatctcaatagatgcagaaaaggcctttgacaaaattcaacaacccttcatgctaaaaactctcaataaattaggtattgatgggacgtatctcaaaataataagagctatctataacaaacccacagccaatatcatactgaatgggcaaaaactggaagcattccctttgaaaactggcacaagacagggatgccctctctcaccactcctattcaacatagtgttggaagttctggccagggcaattaggcaggagaaggaaataaagggtattcaattaggaaaagaggaagtcaaattgtccctttttgcagataatatgattgtttatctagaaaaccccactgtctcagcccaaaatctccttaagctgataggcaacttcagcaaagtctcaggatacaaaatcaatgtacaaaaattacaagcattgttatacaccaacaaaagacaaacagccaaatcaggagtgaactcccattcacaattccttcaaagagaataaaatacttagaaatccaacttacaagggatgagaaggacctcttcaaggagaactacaaaccactgctcaatgaaataagagaagatacaaacaaatggaagaacattccatgctcatgggtaggaagaatcaatatcgtgaaaatggccatactgcccaaggtaatttatacattcaatgccatccccatcaagctaccaatgactttcttcacataattagaaaaaactactttaaagttcatatggaaacaaaaaagagcccgcatcgccaagtcaatcctaagccaaaggaagaaagctggaggcatcacactacctgacttcaaactatactacaaggctacagaaaccaaaacagcatggtactggtaccaaaacagagatataaatcaatggaacagaacagagccctcagaaataatgccacgtatctacaactatctgatctttgacaaacctgacaaaaccaagcaatgggggaaggattccctatttaataaatggtgctgggaaaactggctagccatatgtagaaagctgaagctggatcccttccttacaccctatacaaaaatcaattcaagatggattaaagacttaaacgttagacctaaaaccataaaaaccctagaagaaaacctaggcattaccattcaggacgtaggcatgggcaaagacttcatgtctaaaacaccaaaagcaatgacaacaaaagacaaaattgacaaatggaatctaattaaactatagagcttctgcacagcaaaacaaactaccatcagagtgaacaggcaacctacagaatgggaggaaattttcgcaatctactcatctgacaaagggctaatatccagaatctacaatgaactccaacaaatttacaagaaaaaaacaaacaaccccatcaaaaagtggtgaacaatatgaacagacacttctcaaaagaagacatttatgcagccaaaagacacatgaaaaaatgctcatcatcactggccatcagagaaatgcaaaccaaaaccacaatgagataccatctcacaccagttagaatggcgatcattaaaaagtcaggaaacaaaaggtgctggagaggatgtggagaaataggaacacttttacactgttagtgggactgtaaactaattcaaccattgtggaagtcagtgtggcgattcctcaaggacctagaactggaaataccatttgacccagccatcccattactgggtatatacccaaagactataaatcatgctgctatgaagacacattcacacatatgtttactgcggcactattcacgacagcaaagacttggaaccaacccaaatgtccaacaatgatagactggattaagaaaatgtggcacatatacaccatggtatactatgcagcaataaaaaatgatgagttcatgtcctttgtagggatatggatgacactggaaatcatcattgtcagtaaactattgcaaggacaaaaaaccaaacaatgcatgttctcactcatacatgggaattgaaaaatgagaacacatggacacaggaaggggaacatcacactctggggactgctgtggggtggggggaggggggagggatagcattaggagatatgcctaatgctaaatgacgagttagtgggtgcagcacaccagcatggcacatgtatacatatgtaactaacctgcacattgtgcacatgtaccctaaaacttaaagtataataataattaaaaaaagaaaaaataaaataaaatacaaaacaaaacagaacaaaacaaaacaaaagaagttctaatcctgccctgccagcactggccatatgaaaggcaaggtagctcactggttgtcatggaactcaccttagaaaaatggaaacatggcactaactgttagaattccttcttatctaacattgtgttaatctaatatctgtatgtctttggtacaagagttcacaaatccaaccaaccaaaataacaacaattatgatatttaaaagctcacgatactaaattctgaacttgtaattactgtgcattggtatatttatttctaaattttcaaggtgccaaaattgccccactctgttaattaagccggggatgatgctgtgataatggcttaccatttccgtacccactattatggaataaaagcaaaaaagtccagctgaaaaataatgcaaaaaactaaagagtctccaaatatgaaaataggacaacagacctattgaacattccaacacatgattgaccagccaattccaagtgctgcgaaacagccatctattttggtgtatttgctttaaaagtaaatgagaaagcattgaataaatagacatcccatatagcaccgatgatttaaatttggtacttattatctatagccataccaccctgaacgtgcccaatctcatctgaatttgatatttattgtaaaacaataatgatttatgacatatatatccatgctaaaagaaatgcaatggtacggtttctcatttatttatttattttttttttgaatgcttaaactataaggcagggttctccaatcttttggcttccctgggcaacattggaaaaagaactgtcttgggtcacacagaaaatacactaacactaacgataactgatgagctttaaaaaaatcaccagaaaaccttacaatattttaagaaagtttatgaatttgtgtttggccacatgcaaagccttactgggccacaggatggaaaagcttgctataaggcttaaaattcatttatatttacattccattgcctgtaagaaaagttatagatgatcagaataatattgactcaattcatttatacttttttcaatataatctcccctcagaaattctaaacataaaacaaaataaacaacaattcttatcttgtcattgaaatattacgtattaacgatttaggtgactaattgactatgcagcaaatgcaaatgtaatatacattcgtacaaataaaatgataaattctcctttagcctagttgattataacatgatttcacagtgataaccacaaaggcaggacaagtacttagtactttgctaggtgattctgtttgtctgtgtctgcgtgtgtgtgtgtgtgtgatgtgtgtgtaatgtttacatttttaagtacacagaaactcatacacacccgtgtgtgtgtgtgtgtgtcggtgtgtgtgtgtgtgtatacctaaattaggtatttaaacctacctgaatagcatttcaatgctaaaacttaaacacaccaaaagaagacagaactaaaaaaacaacatagcaccaacaaaatagacctattagttttctgattaggttctgtgtttcattctcagtttactttaaacttatgatacataagaaaaaaacggaatatatctagattatcgtttgcatgatttgtttaaaagagggtaaagttctaagcttgcccttggtttcagtaaatttattcttgtaatccccaatacaccttccacatgccttacccaaagtatattatcttttaaaacttattagagagatcagtaaatgctgaacctgcccagcccacttatataatgaaataataaaatgtggattaaaacattgttttaataatcaaataagatacgtcacattattagcgaaatgttggacgggctatatatgctcaatcgatatttgttcctttcaaacataatgatgtatgatcacagaaaagaatttagcattctactctgagggaattttatggacaacagtgtttatcatatatactcattttcaggagtgacccctaaaaatagattcacaaattgtgaatgcccgattaatttgaagctttaagttagaaagaaaaagaacagctatataaataatggaacatcatttttttttctcactagtaatgcagtctcatagttaaatgaagtgaagggaatataatcaagttaaaacatgcaattataagggtcattctaattattgagacagaaattaatagcatcaaactcagagtctagaactgtatgtttgaatgggagaatgtaattgaagacggtggatagaatctcaattagcaaatgaagataatggccaataaagaaagaggcaaggaaaggaaggatcaaagtctttcaagtaaagagtaattacatgggatgagtagaaagtacacgtgattgtgttatatgcacagataccactgctagatgtcacactcatatcacagcgacaccctatatacagagatcatctttatgcagtgataattttatttcattttaaaagttaattaatgcgtaagtgcagtatagccctaggatgaatttaggggaaaaaatgggtatacagagtttggaaaatggagaagatcatctctaagaaaatttgcagtagactgaaaatttaattctgtaaaaaaatatttacactacagaatcagcaattaaatatatttaaaataatttattcatgtctgatgattaccactgaagtaatctaaatggtaacttcttctttcaataaggaagctgatgtaaaagcaactccataaaacatactgtgggtcacagcttgtcaataatttttagcccctcaatgacatgttcttcaattggaggtgaaaacactttgctttttctcttctatcatgcacagacattactggtttatttgtaatatgataagtcagagacagacattcctttaaaatttgaacttaagtaaaaattcataattttgaacttttttaaaatgattctgtcaaattgataagcacaattttaagtttccttacaaatacttaacaaaaataattttgttgtgagcagagaaatttaaaactatcaaatgatgaaaaataatatatcattttaaaagattagtgaagcaatatgagtatttcgttgatgaaagcttttctttcagcatcacttgagtatttctgtaagtacttattaaatgtctcccctcctggattgcccacctaccacttaaaacactcagtgagttttttagttggggcatgtggacagtttggccacagcttggggcagctaccacatgatagtctgggaaacctatgaactgctcctgagaacacagaaggaaaattctcagagcctccgacagtgtcatacacatgacaagggtacagttaatgtttgctgataatgatggcaaattctgttattatctaccctgcaataattagccaccttccctctgaaaactacattttaggaatgttaactataatttctaaaacttcattaaaatatataaatgcataactatgaaagaaaaagcaatggaaatgttatattaaatctgtgtcagtctgagcctaagagtataactgtaagcagagacaatatatttatttagcattcagcacagcccatatgctcatttataatctaacgctattcaggaattaatggctgaggctaactcttaaacatgagttttagacaagtcattagtcatcaacactggaactgtgctccctgaaaactagctatttccaattctaataatctggagcatatgaggatgttccttgcggcactattcacaatatcaaaggcatgaaatcaacctcaaaggccaccaatggcagactggataaagaaaatgtggcatgtatacaccatggaatactatgcagccataaaaaaggacaagattatgtcctttgcatgagcatggatggagctgtagaccattatctttagcaaactaacacaggaaaaaaaaaatcaaatgttctcatttataagttggagctaaaggaagacagatggacacaaagagggaaacaacagacaccagaggttggaaggtgggaggagggaggggaccgtgaaaaataactaatgggtactgggcttaatacctgggtgatgaaataatctgtaccacaacctgtgacacaggtttacttatataggaaacatgcacatgtacccctgaatttaaaataccccaacactttcggaggccaaggtgggtggatcacctgaggtcaggagttcaagaccagcctctgggtggatcacctgaggtcaggagttcaagaccagcctccccaatgtggtgaaaccccatctctattaaaaaatacaaaaattagctgggcctggtggtgggtgcctttaatcccagctacttgggaggctgaggcaggagaatggctagagcctgggaggcagaggttgcagtgagccaagatcgcaccactgcactccagcctgggcacctgagtgaaattttgcctcaaaaaaaaaaaaaaaaaaaaaaaagcaaacgaagaaaaaaccaaaaagaaacacaaaaatgcaaaaatgagtacaggctgggaacctgctttcttgcctttgaatcctggccctaccccttgcaattcgtcatgatcttgggcaaattgtttaatctttttgttttagggaccctgtcttaaaaagggctcacaatagttttgtcacaggtttactatgaagattaaattggacagggcttttaaagtacccagaatagtacccctaagcaataaacatacacgtgtgagcttgataaataatgattttaaaaacagcatacaccatacagactcaatacagatccattcagggaatccgaaaacactattctgctaatacaagtgggcataaagagaaacatgcgctaattttttaacacacaaatggatcaaaagtatcctacctatctagtaaatgtgctgatttatgaaattgcacgttatttaaatagctaatgtaaaaagtgacacattttaacatagtcacgtaaatgcccaatgaatgtctagtttgaagacatgtactgaaatatgttcgtcagatagactcatgcctttgaagagctatcattttgagataaaatatcccctaccagtggaaatgtgtaagatgagtggcagacccagtgccagagtcagaaagtgccctgcataagcatgcaatgaacagagcaaccgttcttgtaggcctgagtactaagatcacggctttcctgtttgtaaactgttattacgttgagttcatttccctgcaatactttcagcttaaggtctacggtggaatacagaaatcattcttaacaagtccacctatgttttgttatgatctgatacatacaaatccctaggtacatagtgcctgggtgggcctggattctgcacgtgtggaagacgcagctgttagaggaggcaccctctttgattgggccatgccaggctgtcaccaacgatttggcatccagaggccactggagcatatgagaagcagtcaaggtgccctgaatgttccagagaacattgtggaacactggaagctcaggacggccaaactgtgttgccatactcactgcagcagaggggaaagtgtaaaattacaagagaaggaggcccgtgttcaaggttgggggcagtcagctttccaactgggactcctcatggcccagccctgggctgattcctatcttcgtgttgaatgcagcatctctgctcaccccaagacagtccagtccctgacacactgagagtaagtttacagagcccaggtttccaccttgtaaaataaggatgctaataaggaaaataaataaataaataagatggaatttaattacttattttgaaaactggtgacttcacagcattatacgaatataaaagacgaaataataggaagggtctcagcattgctaatgtcaaatcagcccctctctcaatcttccaggggctaagaggctattatttttagatgcctctatttccccaaaatcagtatatttgttttctattaagactaaatatttttttcagcggcgtacggtcgctcacacctgtaatcccagcaatttgggaagctgaggcgggtggatcacttgaggtcaggagttcaagaccagcctggtctacatggtgacaccccgtctctactaaaaatacagaaaaaaaaaaaatcagccgggcgtggtgttgagtgcctgtagtcccagctactcgggaggctgaggcaggagaatcacctgaacccacgaggcagagattgcagtgagctgcactctagcctgggtgacacagcaagattctgtctcaaaaaaatataaataaaaataaaataacaagtgttcttcttcctttatagaacagttttaatgcccatataaatgtttgctcaaattgaaacaaacattatctctaaggtcccttaaaattctgaagaatttcaccaagtctccactctgttaaaacatattgatttactgcttgtagtattaaaaataagttgctttaaaacaatctgggacattgttggattctgttcagagaaaaaataatatggaactttaacatgtgcttatggcagagacttaaaatgacttttagggaatactgatgctctttcagtcataggaaaggacaacccactaggatgcaatggttttaactgacacaggtaagcattaagtagcatttgggccaggcacggtggctgatgcctataatcccagcactttgggaggccaaggcaggcagatcacctgaggtcaggaagagaccagcctgatcaacatggtgaaaccccgtcgctactaaaaatacaaaaaatcagcctgggtggtggcacatgcctgtaatcccagctacttgggagactcaggtaggagaatcgcctgaacccaggaggctaatgtaggagaatcgcttgaacccaggatgtggaggttgcagtgagccgagattgcatcactgcactccagcctgggcaacaagagtgaaactccgtctcaaaaaaaaaaaaaaaaaagcattcaggaagtttattctagttagtgtacattaaggcaccataaatgaacactcagagaaatatatttcactctcaccatatagtaaaataggcaggtattattattattttccaaaatcacagtttcagatgacttgctgagactatttcataggcagttttatacttttattctctcaggccatggcagcactggcatgatatcatgcatttgttgttaataaaatacaaaacagtccctattacaagtggtagatactaccatgggtatttttaattcccctgcgtttatctcctaaaaagccaatacctttttttaaaaaaagacctaagacagtgcaaacttcgtcctagtcataggtgatttaaaacaaatagaaaagtgactgctggcaggatgcacgacatgtaattaaaaacataggttttaaggtactgccacacacatcctaacgtatttaaattgcacgtcattcttctaacgatgattttggcaggaagggacaattttacatgatgtaaaatttgactctgaggacccagaaaacagcgcacttttggaggccacgcttgccctagacgtcggtcaatgtcccccggttgtcaaatcgctcacgtggttttctggaccaaatgaaagacaatgcaaaccgaggtgccttcattcattctgcataatagcaaacaacacaggaaacattcgtatattgcctcagattatttcggcagatacaagtcctgaaatccagcctgagaaactttattttggaaaagggtccatcaaccatggttaaacctggtcacaaaagatgacttgcaaatagtttatttgaggctgtctttaggaattcaggcagtatgaggtagacactgtcaactgacgcgccctacagttcactgcaagcttaagattctgtgagtaagattcccgccttttatctatcggaaaaatgaaaactctcataaaacagtctagtcttttaacctttataaaaaagaggaagtgtaaataaaaacataataaacaatttttgagtaatgtctagaaaagaaagatacacagatttttagtaggaaagaagataaagaaactccaggatgaatattatgggggaggatggtaattgggagggatattaaaaaaaaaaacgaaatgtttctgcatttgttattgggtctatggatctgcctgatgaaacacacggggttggcatagctgctgggtttctccctccatggtttactcagatattagagccctgtgttgaggggacccagacctaatgttggactgtgatgtaaacagaaatacacggttactgggcaaagccactgaaagcccaggttttatttgttataagagtgaaagttaattatctagtaatgaaaatacatgacattcacgttttggtttactcaaacatgccctgtaaaccaagtttgtgagtcatctctgagttcacagaaggtgcacacacagcacgtaagtgcccagctatgcaaactcatgtgtgtttatgccccaggacccataacagatctaagcccacctttgcccatctgtagagaaacacttcctatctctttactcaagaaaacatgttgagtaaatcaagatgaagcctggtgccaactgtgtttattaggaataatgataataaataatattaataagccatgaatattctaactctacctaaaagtttgcctttgttattagaaaataagaaaaaaacagtagtccagcaaagtatgtttgcagaaaagaaaaacaaaatttttccgctagacagagagctattaattgtataaacatatattaaagatcaatcaactttatggttaccatcaattatccctccaaaatgttgatatatgcatgatactatgttagttgattagtttttggaaaatggcaaagacccctagcaaagacccttctactgatgttctaaacccttatttatcatggaatgcatttgaacggaaagagtgttgagaattaatttttcatttgtattctaattaatacttttgacattagaaatcttgataaattatgaagattaaacaggcacacaaaggataattttatcttgttgccatatattaaggtaaagtggattcaaagagcacagctttttaacatattaatattttttgtggtacgtaatacatagccttgaatcatttctaagccattgaaaatctgtactcttttgcatattttttttttctaaaaagcagagagcatagtgtagtgcttaaaagcagagactcgccaggtgtggtggctcacgcctgaaatcccagcactttgggaggccaaggcaggtagaacacgaggtcaggagatcgagaccatcctggctaacatggtgaaaccccatctctactaaaaaatacaaaaaatgagccgggcgtggtggcaggtgcctgtggtcccagctactcaggaggctgaggcaagagaatggcgtgaacctgggaggtggagcttgcagtgagctgagatcgagtcactgccctccagcctgggcaacaaactccgtctccaaaaaaaaaaaaaaaaaaaaaagcagagactctgggtctggtctagttttacttacatctaagccctatcactgaagttaggggccagttaacttctaacagcctcagtttcctcaccaatgaagcagccactacttgacagaatggttatgacatttaatgattaacgctcattaatgtgaattgcttagaataatcagagcctaacactattagagtatttcgtaagttaaccaagtaaaataatacaatcaggaatacaaattaaaattttacatacacatataagcttttttttttttaactgaaagagactctgatgatctattcccatgtttataacgatgtggaatggaagctcaaaggggttaaagaataatattagtgttgtaatgagactgaaatctttgactatataaccagatagatttttcattatgaattaacaaacattttacagaaaatcatctgaaatcacatgaatggatataactaattaaacagtactatgcggccattataaaatgagagcatgtcctctgcagggacatggatggagctgggggccattacccttcgcaaactgatgcaggaacagaaaaccaaataccacatgatctgacttctaagagggagctaaattgtgagaacacatgggtacacataggtgaacgacacaaactgcggctcagtggagagtggggggggcggggaagggagaggatcaggacaaatggatactagacttagtacttgagtgatgaagtcatctgtgcaacaaacccccatgacaccagtttacctatgtaactaagatacacatggattaaaataaaataaaagttgaaaaaaattcaacaaggccaggcgaggtagctcatgcctgtaatcccagcactttgggaggccgaggcaggtggatcacgacgtcaggagattgagaccatcccggctaacatggtgaaaccccatctgtactaaaaacacaaaaaattagcagggcatggtggcaggcacctgtagtcccagctactcgggaggctgaggcaggagaatggcgtgaacccgggaggcagagcctgcagtgagcagagatcgcgccactgcactccagcctgggcaacagagcaagactctgtctcagaaaaaacaaaaaacaaaacaaaacaaaacaaaaaacacaaaaaacaaactaaaaaaaattgaacaagatagaactaaaagcattgttcttacttgtctgcaagatactggtgaagtggaggtcactaaaacatgtgtctcatctgaactacaactgaaaatgcttgtacttcatccatgaatcactgttcttcagctgtttaagctttctatgttgaaagaaaactacaagatacattgaaagaaaatgaaaagccatatgtaaaattcatcagattgatttcagttctttgtgcctttaccaaatatatatactctccttccactgaaaaaagggaaggtcattccaaaaaaaaaaaaaaaaaatggtggttcagttcatcctgtggttaaggttgaattgacttcatctcctatcgaatgatttacaatatgagtcagcaaaatcaacagtcagtttccagacctcagcaacatcaaaatttgacaacaattcaaagatgaggaaagaaagtgagcattagcacaattcagctcccttaaaccaactgcacccacaggcaaaacacccgtagaggaacacgtccctaaggatttcactcgaaatatgcaagcttcccgctgttgccaattctcctgcaacaaaagtatttgtgttttcatctcaatagccattacagacaaacagaaaaccaaaaacgtgggaaggagaaggatcatctgcattgcaaatatgacgcgtcttcactccagtgcaccaataggcatgttataaaggctcaacagatggctttaaaaatcaaagttaaaacagcaaagatgattgaatgttaacaaaatatagttcgttaggattataaattagatgactgtctagataataattttaatagtttcataaagtatgcaattacattgtcccatcaagcttcaggaggagctataatcagcagttcttggatgtcttagagactctttctcttgctctctttggctaagttgtgcctggaacatcaagaggccaccatcagaattataccttcctctgtgtggctctccgtgaatctcggtagcactgatgttgaccaccacataaactaaagcccgtttaagacaataccccctgacctttcagcaacaggggcttttatctacatcagcaccagctagtgggtattttactcttcatcagctttgccctataatgagaacaggttgggccacagcagagggcatatttgctcagggatcagagtgagaaaaaccttaaatctgcacttaaatcttaaatctgtattgctcaccaacatgtcgggtatgaggaattgtctatgtatttgcactttagtgacttctatcatttccattttcaagaatttccatttgtttcaggctcaaacacaacctcctcactcattacttgtggtaaacgctattaagcccaagatcactcatgttcctgtattctgtccttctaggaacttgattccataagtcacacctttaaggacatactcactttacctaagagtattttctgtacgtggtgctacccttcctattttcataatatttgagtgttttgcaaatcaaatgcaatcatatctttgtaactcaggaactgatcttggaatatcttaagttaatgtcattatgtatttatcttatttgaaatacatcttttgagcagtgacatgtgccttaaatttactttgaattctctgagctttcaggaaagacatctgtaaaagataagttgcccagtaccatgcatttaacctcagctctttggagtcataagcagggctgaaagcaaagttgtagctgccacaaacgtaaaaccttaacgacagggtattgtgaaaatacgttgcatcacacgtgtattaaaataccatgcccataatgaaaaccttgctttcaaagaacgtcctccaataaaaaaaatactcaatatatactgccagtttaaatgtactgagtatcaaaatgaatattcctgggcttccaagtctgtttgcttctctgttcacatccaggtacccatgccaggtcatgttttccctggatggaatgatggacattagggaaggtgacgatggcttcagtcttgctgatattacccaaggactggctgaagaggtctgagtcacaagaggctgtgggaaaacaaatgaaagaggcagaggatgagggtcccaccgggccctctgaggagccaatgagtgtgctgtcaagggaggcccagtgtttagtatttacccaaacacggcaaaccacagctcaacaaagataaaaatcggcatttcaaggcgcaggaaccacgtctccacaggagaatgtttaacaagtgattttggctggcaagttatggaatcggacagggatgacatcgaaggatgctatggcgagaagagcaggaaaacagaatacagttcagccgtgtttcccattcattcttcagcaccgagaagcctcagcagaactggccacctccacgaaggaaagcggcaggagaaagtacaatgtttaatggtgggaggtggggctgcaggtaatttatattctttcctaagtaaatgttctatgattactatatatccccttcataatgtttttgatatttaaggcatgatattaaaattatagtaactttcatatacaaaaaatatattaacaatttcaatctactgtaaatgttatggtaggcatacgttcaacaaagaatgcagaatgataaaaatgaccaagaaaacaattaaaatattgccctatcaagtctgtacatgtcatacctgacactactaaatttctttcgtccagcaatcaacactgctgcttttaacaccaaatgaggagtgaatttagaaattataatgaaggaataatataaaatgttcccaagtcattcctataggatgggatttagaagcttcaggagaaaaccacagacctaatttgccatgttgatattgctcacattggcatcagtcatgaaacaatggacactccaaatagcttgtaaaatatctaacaataaatggtgacaaaggcctgaattacaatagcgccctgtcacttttctaataaatagtgattatcatgtaaataatgccaggaagcatctcaacaactatttttattataatgttggcaacagcaaataaaaagtacgccattttcttttgtttcccctttgacattaatttgctaacagagtaatcatacatctcccacattttcttgcaaggaaaataaaaacatttaataaaatggggaaaaggatcatacaacacaaagccatttgccaaagttcttcaaattatgcttaacagatttcattatttaaataaacattttttttaacacatataaaacattcacaaccttcatgagactctttggtcactatgagttctgcaaagaaaaaaaaaagtttgtttcaggatctcccactgtattatacccattttcattggtcagccacataattagaactgttagttctaatttaatgggagatcacagtagaagaggtgattagtccccgggtgaaaatgaatatgagaatggactatctagctttctttcatctgggaattttccatctcttcacattgtaacttttttcactatctacaatttaaaaattacaaagcagtattcagctgttacgcctagaattctgcccatgaaattggaaacagaaaccagatgaaacattttaaaggaaaaattctactttgatgacagttctatccagaacatgtgtgtacactgacttgtcaatggaaaataaactaaaaccttgggtgcatacattcgatttcaggcagattttttaatttgttttttaagagacagggtcttgctctttcacccaggcagttccacaatcataatattaataggcagaaaaggcaaattctatagaacaggataagttaacaaatcaccctaacaaattggatcttctataacattttttaaaattataaaatctgtttgacccaccgatgcaagactgtgtcatgatttaaaaaagacgagtgtggcagtacagccttaatgtgctcctcgtgagtctcaccctctgttgttcacatctctgtatgatcccctgctcttgactgtgagaaagacttgtgatgtgcgtctgaccaatagtatatggtagaggtgagcgttgtcactgtcatgactgtgtgatattatataaggctgcatcttgcctggatggagttatcgatgctccttctaggcatgatgaagcagaggctgtgttgaagaattccacgcagggagaaattgtggaaatggcccccagacagcaaaacgtcggggctctccgtgctcatgccaggaggtagtggattctgcacacaacctgaatgagcttggatgcacagtcctgccctcaagcctgtagatgaggaggcagtggaattaacgccttgatcatagcatgcgagacttacggcagaggactcagcacagtcccaccccgagaaaactatgagataaaaaatgccaggccgggcgcggtggctcacgcctgtaatcccaacactttggggcaccgaggtgagcggatcatgaggtcatgcgatcgagaccatcctggctaacacagtgaaacctcgtctctactgaaaatacaaaaaattagccgggcgtggtgacgggcgcctgtagtcccagctgctggggagactgaggcaggagaatggcttgaacccgggaagtggagcttgcagggagccgagatcgcgccactgcactccagcctgggcgacggagcaagactccgtttcaaaaataaataaataaataaataataaaaataaacgtctgctgtgtcaagccactcttttgtggtcattgagtttacagagcgctcatttgttctatcgctgccgtacattactacaaatagagcggcttaagagaatacagtcttacttttagttctgtaggtctgaaattcaatacaggcctcactagacaaaaatcaaggcgttttcaggctacagtcctttctgaagcctcttagggaaaatctgtccaatgccgattcaggtgcttttagaatccagtttgttacatttatggggcccacattcccatttccttgctggctgtaaactgtgagtcattcatttttagcctcaaaagactaccacattctctggggtcatagccttctttgtgaatcttcaaggccagcaatgctgggtccagtcctcattgaatctttgtgacccattcttctgcctctttctactgcttttaagagttcacatagctagaataggtccaccagggtaattaggatggtctctatctcaagaccctttatcttatctgtaaacccctttttcccataaagcaacctattcacaggctccagggattaaggaatgaacacactgggggtgatatttagcctgcacatgccttcatagaaaacatatagtgaaagttccgccatcttcattaaattcccacatttctaagagtttgttcatgttaaaatttgtttgttctttgctccaattttagtcatttgagcctcaccgcccctcacaatatctattctacgctttctattttttaatgtgaaaatatttccttttctgttaaatttaacaattattcactgagagcttgtgttctatgggaaatgaaacatcaagatgaagacaatgcaaagtgtgtcctcaagcagttcccagacaaactacaacaaggttatcacctgttctcctacggtcaaaaaatgtgtataaaagtcctagcattttccagtaagagcatcatgaattctgagttattcacagataatttcgtataaccagatagattttcaaattgagaagtattaggcattaagtattatgatgggtaatgttatacaacaacctgacttggccataggatgcccagatatttggtcagacattattgtgggtgtgtctgtggtggtgtttttacataagatgaacatttcatttggtagaatgagtaaagcagatttccttctgtaatgtaggtgggccccgtttcatcacttgaaggcctcagtagatggaaaactgactctctgtcaagtaagacagagttcccttgcctgatggtcttccaactaaaacactggttctatttctttggagagccctggctaataaaaatcatcttccagctggacatggtggctcatgcctgaaatcccagcattttgggaggccgaggcaggtggatcatttgaggccaggagtttgaggccagcttggccaacatagtgaagctctgtctctactaaaaatacaaaaattagctgggcatggtggtgcgttcttgtaatcccagctacttgggaggctgatatgggaggattgcttgaacccaggaggcagaggttgcagtgagccaagataatgctaccacactccagcctgggcaacagagtaagactccatctaaaagttaagaagaaaaaaagcttcatccatttcatctattcattcatttagtaattctgtacacattgtcttctattcattggcttgactctgggaataaagtaatgaataaaacatgctatctttccttaagagttgggggcacagactgcagcaatgaagaagtatttatgctcagcgattatcaaagcgcaaagcgagggaagtctgggagtctgagttaaggtaagttttacgggagaaggttctttgagttgagtcttaaatgatgatcagcagtcccgaagcatgatcaggggagtcattccaagcagagagtccaaggtagcaaatacaaagaggtgcggagcaccacatcccattaagttatcctcaactcattattacagaagcacagaaggtaaaccccagagaagtggcagcaggggctggcaagcccgacaagagtacgtcatggtggacctgtgtgctaagccaggagcctgaactttgtcctacactgtgatggacagagacttttcagaattttcagattggcaatatagataagccatacctgtggtggttaggtaaaatatggatttgggggatgagaaagaaatcactagaggatgagaaagaaatcactaggatggatttgggggatgagaaagaaagtgtctagaaatatgacactttcaggaacgtgcacaaggaatttttcagcgcctttgattttaacgtaatgagtctttaagcatatagatcgatggataatgtcccattatcaacatagcttgccttttccagatggggctggtaaaaccccaaggactacatggatactaagtgtattttaatataattggttttctttgtaatctatactttctatgtgaattttgaaatactattctaagagttcatcgactttactagattaacagaggtcatggcacaaaaagttaaagtaccatctcaggagagacagcgcaacaatatcacgtatttccccttccttttaatttaattaaaactatttttactttccttccacgcaggttttttttgtatttccgtgtgtgtatttatctttttttaagacagtactgttgctcatttcctcctgtaatcctttgcaaatgagcaaagttcactttcaatcccctatgtacagtgagctctcatcctctgcagtctggcaaaacccctgaggtagtagagccagcgcccagctcaccctgagcttctgctgtccgtaaagttctcatatatttgtatgagactgcagaacgtatccagcacagcactggggatgatcctactttcagaaacattaaaaaatacaataccaaatatcctcttgaggttagacctagcctatagtgtgaacacgctaaattcatacatcttctgctatggtcattgatatgcaggcagtgtatgggtgctttttcatagtttgaggtctgtatctgaagtctacctctaaagcacatagatgctttaataaagatgcatagtgtggtggagtgaaaagaatggatttggtgctggcattagctgtcaagtcatgtaagtctattgcatctcagtttcctgagaaactccaattaaaaaggcaaataggaatatggtgtaaaatgtcaattttcatttaaatataagcgatcatcagtattgaatcctctcggctaccaaaggagctaccggacaacagacaaaccaatttatctttgattcctcctcaacgccttgcattttgctttgcataaataaagacttcaacccaagctcagtgtatgaggctggacaggcaaggcagtccagatttaatattgttaatccagtgccatttctcagggatcagatgctttgatcctcttaaaatattttcaaaaactgaagactcaaggataacatgctgtttagatagaaaatcggatgacttttgtaggtttccactagataacagcagcaacaaaactcttcctttacaagggcttaccatgacaatatttttaggcccttagtggaagacaagtcatacattttgtggtgaagtacggttacaaggagtttcaaccaatgtagaaaaaaagacctgaatgaaataaataatggtgactattaaaagttcaagggccctggacttgttgaaaattatgttgaggtgccataaaatcctgaatgattagctctatcaacaaatcatcctctttatatttttatgtaataagttatttgagattataacaactgaatgagatttccttcctttaacattatagtctgaaattgcaaaagctcctttttaactacctggacaaaatccagttaaatgttatgttatgaaattctggccagcatttcaaaacaattcctctattcaatacactgatgataattaccttttttcagaggataatttttttgttaattatgcttagagtgtcacttagatatggtatgctgtgtttagagtctgcttagcaaagcatgattttttaaaagaaatacaactttaaaaagcagaaaaaaattaatgaaaatttgatttaaaagaataaccccacagccgtctactcaacactcttatggtttaagtgacaaagttgaatctcagagataatcacttaggtaaaaaatgagaaattatttagaaatgtatattaatataaatgcctgctgtgctatccttatataattataaatcttggcgggcctggaggctcatgcctgaaatcccagcactttgtaggctgaggtgggaggatttcttgagactaagagttcaagaccaccctgggcaaggtaggaagaccgcacctctacaaaacataacaattaaaaaactagccagacatggttgtgtgtatctgtagtcccaactactctggcgactgagatgggaggatttgttaatggagacggaggcttcagtgaactattgttaggccactgcactctcgcctgagtgacaaagtgaaaccctgtctcaaaataatgatgataataataataacacatctttaagaaacgctaagctagtttaaagtatatgcattcatgtcttttctaatctccataactaaatgtcagaaagttgtcttattagtttactttttctccacagcgccgttcatatcagtgtggaaggcatcatgagatactacagagacgaattcaaacaccattcactactttctacctagataaccttgggccaatgtcttacctttcagagaatcagtgactttgcatatcaattacagatacctttgtagaattaaaatgactactgtaaggattaagtactgttgtgtatgcagaggaggtgatccaatacatggcacaaagaaaatactggtgagtatggttgtaagtaaaaaaattcagggccgggcgcagtggctcacgcctgtaatcccagcactttgggaggccgaggcgggcggatcacgaggtcaggagatcgagaccatcttgggtaacacggtgaaaccccatctctactaaaaatacaaaaaattagccgggggtggcgctgggcgcctgtagtcccagctactcaggaggctgaggcaggagaatggcatgaacacgggaggcggagcttgcagtgagccgacatagcgccactgccgtccggcctaggtaagagatccagactctgtctccacaaaaaaaaaaaaaaaaaaaaaaaaaaaaaaaaaaaatcagaaaacgatatgcaacaactgtagaagaaaattgaaatataaaatacaaataagcctttatttacccttgaccaaagttttcatttctataatttactcaagtgttatacctatgtgagaaaatgaagagctaggaaaaatagtttgaaaaacatgatgattggatacatggactcttgagagtctatgaagggaggtttatgtacctaacctcctgcacgactgctgttcaaattcttcagtgctccttatagaaggatcttaattgtgtctaattaacagtgatgaccattatacatggaaattttggggggggggggcgctgcattcatttgccatgctcaatagcatttattcaagccaaccacaaaaaccctgagacagaaaacaaaaatgaatcctacttgcattttgatgattatactctggatgagaagaaacgaggacattggaatctcccagtcctgctgtgggttggctcttaatgcttgcctctcagtttaagagtaaattttgtttttttgttagtttttttttctagagaaaacatctttcaatcagccatttctaggacgggtgggatgaccagctgtgttagtattattactcttataatgacgcaacaaaatgagatgtgactatttgatgaattatgccttatcttcacaattcagttaagattttattcatgttactgattatgctttaaaaaaatgaagcatctgcctatttgcttttcaagagctcacttacaatatggcattttaatgtcttcatgtatcattctgcacacttttttcttctaacagttcattcttaagctttttcacaagaatggaagaatgtagaggtcgtggaaatgtacaaaatgtttcattacgtaagttttaactaagttttaaactaggtcttcaataacaaatttgcacttttatacttaaaaatttaaaactctatttgtcaggacatcagcctcgacaaattactcctgtattcattcaaaaaaggttactttcctgcaatctctttgagtatcatggtggatattgtaaatttcctctcgaatacaaccaaccctgtagctacactcataaaactttcagtgaaagagggagaaccacactaatcaaacaagtactcaaatatttacttaataactaagtgttacaaagggagaaaatgatagtgatagaacagagaataaaactgaggattcaaacgtcagaaaatacctagaaaaagagggcagtgaagctgaaacttgaaacatcaaatgcaggtacctgagaaatagagggtgtcctggagaaggggcatggactgtgtggacacctggagtgaggagagatgttggccttatctctttttgcagttgtgggaggagaacgattacctccaccaaagatgtctgcatcgtaattcccagaacctgtgactatgtttccttacctgctgagaggatttgacaggtgtgagagttaaggattttgagcaagtgagatgacttgcagttatctgtgtgggttccctgttgtcataacatttcttaaaagctgaaaaccttttctggctcaggtcagagggacatgtcatttaaaaaatcgtcagtgagatgcaaccttgctggctttgaagatggagaaagaaggccacaagctcaggaatgttggcagcctgcagaagactgccctgactccttcagaaaagaacacaggcccctcaacaccacggggtcggctcagggagacccatctgcaggttagaagccaacatcagccttccaacctgtggaaatatgaggtgagatctttgtggtttctatgccactacatttgtggtaatatctcacagcagccagaaaaaaatccaatgtgcttttcttctttctataatgaagaaaacatgtttattctcgatgagcaaacggaagactttctgtgaatccaagtaccttctgttattaaacagctgggtgtgaatttggaagtcagtgtagctgggagacttagaatcaaagagcagctgtggcactcaaaatatgtatggctgggggtggacactacacacattggaagttggttcctctcctggccatttgtaagtagggatcacacacacacaaacatacacacacatacacatctgcacacatatgtacacgcacatatacatatagacatttgcatatatatgtacatatacataagctaatttgaggatggattaaaactaaaacttggtcaggagtcatggctcatacctgtaatcccagcacttttggaaggctgaggtaggtggatcccttgagccaaggagtttgaggccagcctgggaaatatggcgaaacctcatctctacaaaaaatacaaaaattagccaggtgtggtggtgcacgcctgtggtcccagctactcggaagactgaggcatcagaatcacttgagcccagtgggcagaagttgcggtgagctgagattgtgccactgtactccagcctgggtgacagaacaagactctgtctcaaaacacaaaacaaaacctaaaacttaaaggatctgtcagttttcaagtcctgaaattcattgactgtgcccatgtggtgctgtgtgcctgagatggaatttcaaagtggtttttcacaccagaacatcctcttttttctaatacccatttatgcaatgctaggaaaaaaaaaaaacctcaatttggaagtttttggttttctttctcagaatcagaatagttttttaaaaatgtcctatttccacttctaggtgagcaaactgacaacatcatttgatcatctgttctacaaattaggaaagatagaaacccaacccataagctaattccaaaaccacttttccttcatgaacacctgagattttgtcagcactttctagattgtaaaataaaccagattcaatttccataatttatttcctcacctttcaaagtgtagaagaaattatgacaccttttctatactgagaggaagattcaatctgacaaaaataattgcataaaagtgtgtaaggagacagtaggcaacaagcctaaattattttataaaaattattattagtagtattttgagacacagtttcactctgtcacccaggctggaatgcagcagtcagatcatagctcactgcagcctcaacctcccagcctcaatcaatcctcctgcctcagcctcctgagtagctgagaccacaggcacaggtcagcacacacagctaacttttatttaatttttttttacaaagacagggtatcactatattccccaggctggtcctgaactcctgtcctcaaagatcctcccatctcagcttcccaaagtgctgggattacaaatgtgagccactgaatctggcctataaaaattgttttcttattataataagaataatttacctccaattttctttctcatgtattcaagcaagagtaatttacctctatttttttcataacaatgccacagagtttactgtaaacatcaaatgctttaaaaagaaacatgatttaacataaacacatttatctcaactctgttgaatgaaattgttcttagagagaaaactgggtgaagaaacatctgatttaaataatagcattgcacatttctctttggtagaactctatttcaaatatcacctacattatatcatatttttgctgctcatatagtttttacaatagttccttgaaaaagattattgttatttactcagatattctaaaataagtatttaatgattgagataaatgtcacaagggaaaaagtgtgaacaattttttagccttggcatgtgcctcatctctttttagtatcaccaaactgatatttatttcatgatgcgcccatttatatacttacaaaagcaatttagttctacaaacaagccactcgaggtaactatctttatttcattttatggatgatgaaactgacattgaaagttgacggaactcactgaagtgacacagcatataaatgatggggtaggatgaagccctgacaatttccacccaggagccacacagagtgagaaagcctctcattgtaacggctgttgtggctcatttgggaaatttttacaaagtttcttcctaccaaataatagaggtttatttcagctcacttcctaggccactgtgagatgaacagctgtttgggccatagaagaaatagatgcctgtgttagatatttgtgggggtaaaaatggaaaattctcccccattaacatatgagtacaaataaacatcaaaaaacagaaaatgaacttcctattatgcactgtgcagaaaatcagtaccgagtcctcctgcagccacgtttttctgactcccaagttacttgctaccttctttttcacacgtttccattctctctacttcaggaattttctttctctttcttcagaaactacatagttcctccccatccatgccataaatcttccctggatccattcttcccaattcaaaggacagaaagtgagtaaataggataaacaacgcagggaaaaggatagggagggtattttaccttttccctggctattattcagaatatatggaaatacatgctgaaaaatgaggatttctttttctttttttaaatactttaagttctagagtacatgtgcacaaggggcaggtttgttacatatgtatacatgtgccatgttggtgtgctgcacccattaacttgtcatttacattaggtatatctcctgatgctatccctttcccctccccccaacccaccacaggccccggtatgtcatattccccaccctgtctccaactgttcagttcccacctatgactgagaacatgcggtgtttggttttctgtccttgtgatagtttgctcagaataatggtttccagcttcgtccatgtccctacaaaggacatgaactcatccttttttatggctgcctagtattccatggtgtatatgtgccacattttcttaatccagtctatcattgatggacatctgggttggttccaagctttgctactgtgaacagtgatgcaataaacgtatgtgtgcatgtgtctttacagcagcatgatctaaaatcctttgggtatataccctgtaatgggatggctgggtcaaatagtatttctagaggatttcagaatatttccaatgaaaccatatcatttctttaaatggtagttgattatataaagattgttctaatatttatgacttttgagtgattattttgtgggctcctagaagcaaattgttttaatacaatattatttttccatagttcagaaactaaatattttataatttagagttgggcaaattgccctcctctttgaatggataaaatgcctatttcatatagatgtggataaaattataaatctataaaaatgttttagtagataagatcacatattcctctttaaatgtgtatacctatttttctatttacatttgcaagaggtgtattatgaatgccagaaaattaaagtgttttctcattttctaaatagtcttaaaaataggacagttggtaaaaataggataatttataggtatagtaataagtataagattacaagttgacgtagataggaaatgaatgtgaaaagttgtataacatgcaaatatagccagcattcccattatttcaagtgacagaatgaaactgtacaattatggctggtctaaaccatgttaacgttaacttttagtggctaggactcgtaattatctgactagcaacaaattagcttaatagtttagataaattcacacactcatggaagattttaataagcaaatcatattttgtcttcaaccaactattttacagtcatttaattgaaccatatctaaaattttaaatagccgattaaaatgtcttattcatttaaaattaatatttcttaaactgaagttttagtttcaaatgtccatcaatagaaaataatgttaagaaaatgaatgaaactgaaatattaggtttaatattcaattcagtaagactggcaacattttcattatgaagagggggttgtttatgtattcctacataaattagtgtgcattcacatgtacatttcaaaagaaacatttttctgatgagtgtattaatagcaaaataacagtagatactgtaacatttcgataatctactaggatagcaaaccattagaactggcaatagcaaaagttacaataattatgttgaaacagatgcaacctcagccctggtgatgtcagtgataattggttccatataggtggagaaattagtcctcatggagcaacaaacataactatatttatattaaatagtctatttcttccatgcctaagaatttatctttaggcaatattcattatagcatgaaatagttaagcagagaaaagtttaaaacctaaaagtccaacagtaggagaatatgtaaatatatgagggtaattcacttttgttcagatatgtgtttactatctatttaatgcaatatcaggacaagcaatttcatacacatgatgattttcttaataaaacatatccaaacatattgtggaggctaaggtgttagaaatgaaaatagactcagctatggaacacagatatttcttcttgctttgaaaggtaactgctcctgttataattgccttctcggtcaaatacacagaggacaagaaacaagaagaattagaaaaaaagactggagaagaaataaaagcaaatcaggtcttatttgaatccttcctggagtaagagggaagcatttccccaaggaattgagttactggcctattataattaccatgttatgaaaactctattatggtttttcaaaatttctttggctataaaaaattgataattgatgtttctattcatctgcgttctgtagtttattaatctgtgatataccataagaacagattatatttttaaacttcaatatcagattgacttgactcattctattttctttttcctactgaaattaatgttaagaaaatgaatatagagtcataaaactaaggccgtgatatgcagtagaatgacataaaaccaattatgcaaaacatcatgatgagtcaagaaatgattaaaaatatagcagaattaaggcaataaaaagcatggaatatggagaatatattgtcgtggaaattttgtattacagaaatcagaagaagaacatctagaaaactgtccggttttacagttgtttaatatctggttggaaaattgaggtagcaataagtatccattcaaaataccagggagtgtgagattttcttaaatttctttttatatatgccctgtagacataacagataaaaacttgaccctttgcagtacgcaatttagagctgaaaaacctaccagtgaaagctgctttctgcttatgccgtgaaccataatgaatccaattgtattctctcctgtctctgacttcttgcttcttgaatttttctttttttgtcctctcttcacccttgctcgctgatgatttacagtgttaacacatcttcatgatttctatctaaaaccaaaatctgccctagagcccaaggttctttccagatgtaggtggctttatcgctcaccttttcaacacttttaaaaagacacttgcccagatttctaaacgaaaaagaggcagccagctggcctctttccttcatttcacagcttgctcttcagtggttcccatctatgagacatcttccctcaaactcacagggacagaaagaattccaaaggacacatagattcccatccttctgatgccgaagactctccagggttcctgtggaattgtatgaggtgtgaactcctcatcaagccaagtgaggacattgtcacatctgctagttcccgaacacttcccttaacctcactcccatggcccctcctctctgggaaacaggagccgcgtgagattccttgctgccatgctgcctcttctggcatttgtccacctgcctttccttttccctgtccccgtgatgcaggaaagacaagcccccgaattggggcttagcctgggagggttgttggcttcacccaggaaggaaatcaagggcaagccagtggtgtcacacagcaacttttattgactgaagcagcaccagatgtcctgctcctagcacagcaggactacaccataggccatgtgcccagagtggcagctcagaggctgttctacactcatatttatatccactttcaattacatgcaaaataaggagcggttaatgcagaaatttctagaatgtaggtggtaacttctgtgttgacaggtggtctccatggaaagcggtgaccacgtctgggtgttgctatgacaatggtaaactggcatggcacactggaggaggtgtcttatgaaaggctgcttctgccccagatctgttttagctagttctctatttggtccagtgtctaagccctgcttcctgagtcaagtcccacctcctacctcaccagccctgtaccaggagagctcctgatcattttcctccttcctgggcaaagcatttctcctgtcactgtgtgtcaaatctgatgctgcctcagcccatctgtgggagctccttcactccctccccaagccagcatgctgggcatgactttctcacaggaggggcagaggactgctctttgtttgtttctttgatgctttcattttcatcctctactgttagattccatgtcaagtgtgggattgtgctgtgtcaagtaagttgtatgataccaactttgagacattcaaatccaactttttcttctcaggattttatagtggaaactggtgggttatataaatctcagtcattttaaacaaaaaagatcaagtttctaactttgaactgcaaacagacaataattcaggaaaattttcttctcttatatcttagtgtgaaattggttcatctttgacttttaagaaagcacaaataggaaacacaatatctgaccaattttctaaaatgtttagagcaaaacaatagctaattaaataatatctcattaattatacaattagccaagaaaaaaaaacacttatctgaagaaagccaattttccacttcattttgctcatttaattgtaatgttaaacactaaaaatcacaaaatcttcaacatactgaaatatgaaagatcttttgaattcaatgagtaaatacgagcatatctacaaggtctcaagactatcagtcttggaaagaatcatgtatctcgggaaagaaatgtttcacagcagtgttgtcttcttggtccctcagaccatattttctataagaaatggttgacttaatgaaaaactcgattgtctggagttctgctttaaacttctctaaatgaaaaaatctcttcaggcaattactacaaacagaaagaaccacaatgaaataaaagtttcaaaaatattttaaaatacaaacacatttccttccttaagaaattcatgttcacatatcattgtacattacattttgggaattttcttgctgttatatattcctgaaatgtgtgttctaatcactaaataatttatccaggaaaaacatccttgtacatgtatttcagggaaagtcatttgcctttttttttttagctggcataaattaagcacctcagatagggggaaaagaaactgaaagaaatccaaagattgatcccttttctttggttcttttctttaatctgctatcattatatccaactgttaaatttctttacatttcttttattccctgtttttctttgaagtaatgcaattcatttaaaattattttacctaaatcagcatcactgaattttgtctacaaacatatagcagtttacgcatgacaaatgagaagattttagctcattttgaaaatttcactgggtgtttgaatgtatttattttcagttttatcttttgtatacttttgagcattccaagaaatgtttactcaaattagatagaagttttgctgaaacggcaaaagtcatctccaagttgctccataagaacagtaaatatcccatcgtactaaaatctgtaaatatggcagtatccttagctgaaatgcagactttaggcaagttgaacatgaagcaacctgactttgcaagtggggagttgacaaagagccctgcaaatgtcaacctccttcacaaactattttcttcaaactgtttttacatacttctggactttagatgataatttttcagtaggagtctttgagggtgagaaaacactaacttgctttaataacccaacatcatatctacagaaaacattcttccaacatcatcaatgtactattaggaagaaagggtaataaagtcaactgtattcctatcttagagacatttttagcagtatgtcttctgttataaaatagcagttgaaacttgcatttgtgcagctgtaatgcaataaaaggaccttaataattccttttcaactgtaagaaagaatatgccttgtcaacggaacgtaaaagtcatgatttcaaagaccatgtaggagaagaagtgtcctttattatgataaaaaagactctgtcacttccctatttatatatatatatatatatattattttctctccatgttgttttaacttattataccttagctaattttgcatcctttaactgactgactcagataaatactattctacaaacttagtcaaaactagatacctaccacccaaatatgtatctacaggtaacttgaagaaaatcccaccaattaaaaggctttacacatagagaatctcactaagatgaaagccatacttttcatgttttgacattaacgtcccaggtagttcagaaaatcatgaaaaatgtacttaacatttgtcctttcagactggcagatggaagcgatcctaaagcttatttagattagacattataaaattttgaaatttgtagcctttttttttctaaaataaagaatagttgatcaaggcctgacattgtcagtaggtggtagttatctaaacaatgatcctgtctactactgccaccatgttatcagtaaagtacaatttttaaaaatctaagaacagaaataattagttatatgtaaccacatacatgaatatgaaacattgtgaaaagtttacaacagcggccttattctttttttttttttttttttttttttacaagctattgaacaatctcattgcttttaccagccagttcatggactggcatttgggaaacacccttctagtccagctttccatcctacaggaagatgaggacaacagtttagaggctgagctggaaagaagacacttcttctcattcccaactagctttccttccctcatacccactgaagacctaacacctagcgttggcttccaagtcatgttgcctctcagtctttgttttcttatttttaaaactgagttactaatttaagacccactctaaggtcactttgagctaatgtctaagatggaagaatatagatgcttcacccagtggagcatgcttagactcaaagacaacatctggaaaatttcttactaggatataaaccaaatggggagagacatagttgagaatgtgaatcatatttcactaatgggtacttgttgtctatgaaccagctgggtggctccattctgtcagcaagtgaggcggggtcctgtcaggtctaatgagcagctctgctcacaccacacctctctgctccagacatgcaattcagagagtttctcaagggccgtgcacaaaaaaaggctattctttgaaatttacatgcttcaatccatcctaatcactgctggtagtgcttatggtaatagctaatatgtgagaacaggaacagttgcccggatactggccagttactagaatgaaaaacacttgctaaataaaatttggtggtgcgttaatgtagaaatgacagacacacaacgtctagaaataaaacacttttgctctcccacttgcaacgtgaaagaaaaatcaaatgtcagctttctgtttttaatgaattttaaaatgcagagtagggtgattgttgctcagcaactgagatgaaagcagccatgggccctccctggtgggaagccgtgggctcctgtgtgatttcctgaaagggtgggaatggggtagaacatggctgagatggggttccctgccagctgtggtgagggtggaacgcaaactaacttgcattgagaaagataagaaaagagacagttattgaaccccagtgtttaggctgagaatcagatgaggtgaaggtgaggtcctacagatactaatgaatgaatggagggatgactcattaattagacactagcatacgactatgtaaccacagtgcatttaacacatggtgtctttcaaggcacacaaacagaaaggggcaaagttctgacgatgtaagtaacaatggacaaaaaggaaaatgcaaaatgatcaataaatatctgacctactgaattatccagcatcttactccctcaatttcattccagtttttttgtttgttttgttttggcttagttcttggatctctactttgtattttaatttagcacatctttacataggatacggctcaatagatggaaattaaatgaatggactaaaatggaagtaagccttgaaatgtttgagacttttacaagaaaattttaccttattaaaattagtagtaatagtattagttttattatttgagaaaaggtctcactctgtcactgaggctggagtgcagtggtgcgatcttggctcactgcaacctctgcctcctggattcaatcgattcaaatgcctcaggcttctaagtagctgagactgcaggcatgcaccaccacacttggctaatgtttgtatttttggtagtgaaagggtcttcctctgttgcccaggttggtctcaaacccctgagctcatgcagtctgtctgacttggcctcccaaagtgctggaattacaggcatgagccactgtgcctggcccaccttattagaattttgaacagaaacactgagtatgtatttgcatgcacgtgtatgtgtgtgtgtatgagtatgagtgtgtttggtgtgtgtgtagctaacgtggatataggcaagagttcatcacagagaactacatattcccatatttgacatatttcctctaaatgctgtgatgcacatttcaaatgtagtataactttaagagaagctcaaaaatacgaacaaatttgaaataaaaaaactatgaccaccaggtttagatagcgtttttttaaaaaaatgtatattcttttttaagttttacaacttgtttttgttttcagctcacttttaatgagcacaaacgaagctcacttcacgtgagatacaggcacagcttactctgtcaggattactgagaaagtcaagttcaattctgcctcagttttaatgatttcttccaagctggctcagagaaagccatggaaccaacgaaatacaaacaatgcttctattccggacaagtgaataggtctcagttctcagggtgccaacctagggagaggggacgcatcccaaacaggggctgatagggaccttgtgtccacggcataaaggcttaaccagctgcgacctctaggtagaaattcttgatcagagatgtgcttttctcctgttcatagccaaatgctgtacttttcataatattcatctcctccctccccaccacccaatagttacatttggcttttagatgtccacagatggcacttcctttcttgcaaaaattttagatagaacatgaataacagattcaggcaaagataccatgtctgaatcattagtaacacaaaagactcaatgcttcctgaatattttacactgagaaaagaatttgggggccggggttttatgaatacatagagagttttttttttttcttccagagaccaggatcctttacattgttctgataatcatagatcaggcattttttccctaaaatttatacatgaaatatgcaaaaacatgtttactttgaacataaatttggatcatacaagaattgaaaataattttaaatgaggttttctaaaaacacagactttaatatgcagattctttaaaactcaaatgtacatgtgaatcttcatgagtaatacttcctgtcactttttctttaaaacattgttttcttggtggaatatctattctctccttttctggcactaacatttcaaagaacacagtgcatggaaaaggcagggtttatgtgattaattctatgatgttaagaataaagcagggacaaaaaaattaaacaagaacaaagagaacgtggattcatgcaggactgaacatgccagtttcttttgttggcatttttatccagacttaaactcagagagtggtgcccatttcagccacaaatagccagtcctctaacttcctgacagctgcacacccacgccagcctatgggaagaaagggaggtcactatgctatttcttggcatgcagtcctcttctcaatctggctgccacctgccttttttatgtaatcccattttttcacaggacaggaccagcctatgacacttgtggctttgtcaacattgcgatggccttcttccttccctgttcctgcacatgccctttttttctgcctggaatcctttcactctacgagacctgaccttctccctgtggttgcctagtcaattctatctgtcacctcagtaactgcagggatgctttcagttcccttgatctcatcacttttaacatggtgcacacaccatcagaatagtgtgtactattgtgtgcatggtaaaattaatacttatttgaagttcctaagtaagtaagtaaagcttgttaaattagtaattagtaaaattttactcattaatagaattagtgcttattcagtacccccacgggactaagaattctcaagatcaaagaacccggcctgagtctgctgccactgccaacggagccctccagatggaaggtgctgaggacaccgtgaagtgtgaatgctgggcctcacagccctgtgttctttcgtaaatgactgagtgaagggaagcttctcatgtttcatgtaagcaccagtcatctaggaggagggggtataaacgaatggagatgttttaagacctttaaaattaccattctctttacagaaaagagaaagtctccagatgaaattacacacagaattccaacacaagaaagaggtaaacatgaggatggggtgtcagacccacaccagcttgacagtctcccttttttccttcttttcttgcccagttttgatttccagcatccctttcaaaagccaacagctccaacaaaccttttttcaaaatggctgtcctaggataggtccccacggttaagacttctctaactagaattgtcttgtgtctcttaaaggataagtctttgatgctaatgcattaaatcaggtagtgtcctgtgtctgttatacaatatagtagataggggctgacattttagttggtgtagtgctagtctacatagtactttgtagaaaagcccagaaataactactgaatacttttcatgccgctgcttatcatgcaaagttatagctagcaacaattactcttcttgatataaaaatgcttctatctagatatgggatttagaatttgcagaagtctttcatataagccaagtgtccatgcaagcactgtgaatcccctgtgtgccaggtgctgccttggactctaacaatcaactatattttctctaatattagggaacttcatttcatgaaatataactctaatatagtttgacacattttataatggtgatataagacacgttataccatagctatacacagtgaattaaacacaggtaagggtcacatgactcgtccctggcatcaaggggagggagaaggtggtggtggaagtgtcttcttgaataaggaaggctttacgcagcaaaggtgtgagcttgaagggaaaccatttggtgaacaggcaagttatcttttgagaaactgttgaaaaagttgactcagttgacctcatcagaaaaaaaaaaaaattaggagctaattttgttgtctgaatttaaagttttaggaaatacaactgtatgacttctatactctacggtgttataggatactggaacatttagggcaggattgttgggctaagagaccacagagtatgaggtcgatcaccctctcaagtaagattcaaatgcaaaaagaaaatgtgaaaaggtgagccagaaaggaaacataagaggaggtggtttcagatgagactatgcaaagaagaagaacaagattcaggagcaaagaaatgtgcagaggctccaggtaatgccatggtagttggtgggaaacagtgaagaagaaatatccaacctcacaaaaagaaaacctatgctttactgatgggtttctggcagtggcttattaacccactgatgcctgaggttgcaattttttgaatttttgcaatcggacattggcgatgaccttgaacagcagggtataagtaactcctacatgctgaacgttctagtaatggaacactagttataaattcctaatcactcttgttggcactttgctcatttcattttatgagtatcccagggatgtagcaatttatctgaattgcgtgtgacaatagcaatacatccaagtttgactttcctatactgtgaattcttagcctattcattaatgcagaatattcaaactgttgattttgtttggtcatttctaatgattttctttaaacttttctctatctcaactcgaaaatgacctttatattatatacctacttttattctgccatgcttcatattttccatgaaagtctcaacctccacttgctgtatgatctttttctaataaataatatttgcatttatgcctctaaactcacatttgaatttgtttctgagtcaagttgtctatgttctctgtaataatgattaattttacagttgcttaatttcaataaaatcatatactgtttcataccgacagtgatttcagtattagtgggacagtggttaggctctaaagcttggatacatctcttcaaatagaggcaaccattacagtgatggtgactggtttcaatacaaacctggctgttttcatcagtctcttgatttggtcctgtaacaatatacagacttaacttctgttttctcagtgtcaatccttttattctgacaattatttcccctatacttttcctgagacatcacctcctattttcatagcaaaaatcaaatatatgatctttccattttggatctgaacccttggggtcattctctgagcaatgctattttttccaacgtatgtctaatcaaatactcccggtgtacagcaattacacaaattatcctcaagtcacactttgtgtcatttcccactaaaatggtcatacgttagaggtacaccgtctactctatcacttttcctgttcctctaacacccagggtaaatgatcagacccagcctcctttcatctgtgccctttttgtagcacctggtgttgtgttcccatctcccctcccgtgttctgcagaatttctgctgtaaaattattttttcaccctcttttaccactccatctgctaaatatagttaccactttacaaatatgtgattatttctttcagttcaaatgcaggtcttttcttctctctcagtaatttcattcactttcgtaacttgagctggaattgggcacatccccctggcacagagtaagtgctcaataaatatttataaaattaattacagagcctccatggtaattgggctctgatcataattcatacccgaacctctctcttgaactctagtcctgaatttccttccgtctcttgggtgttcccaacatttctcgtgaacaccgcaaacgtgacttaaacatttatgcttatgttaaaaaaaaaacttaaaaattattggtctcaatttctacggttggctccaacccaaaaaacactatatcactttaagcaaatctttgttcactaatgaagagtgagatcatttggataatactgctacacaagtcaagagtttaaatattattttggggactgtcttcacaatgtaacttggtttgaatgacttcttttcctgaaaataatatttttaatgtcaccagatagccattatgtattaatgtcttacttagtagagctaattatctgtaagttacttttattgtagtggggagtgcatagaaagacaaaatctcgaattaataccaggtggaaacgatgtacttgtaatatgatggagagaatcactcaagataattttttaaaaattttttaatgctttttttttgaaatggagtctcactctgtcacccaggctggagtgcagtggtgcgatctaggctgactacaacctctgcctctcaggtttaagcaattctcgtgcctcagcctcccgagtacctgtgattacaggcacgtgccaccatgcccagctgattttttgtattttcagtagagacagggttttgccatgtcggccaagctcgtcttgaactcctgacgtcaggtgatgtgctcgccttcgcctctcagagtgccgggattagaggcgtgagccaccatgcccagtctcaagataacttagagatacttgtcagtgaggccttcctgacaaggttatttgactggaaatttgaagcgtgagaaggaggttagcatgtacaacagcaggaaagaggaccacaccatgaggaggacccacagaggcctctagacaacggttagtgtttagcagtatgcgacgtccatgggatggcattagaggtcagggcagtgagaagacctcatgcattaattttaaaacatcactttgtgtaagaaatatctaatcctagtgcaagagtggaaacatggagacattactaaacaattttaggttttgtgtgaaataattgtggcttttcctagagtgataagggtccatgtgagaggaaggaccagtggtatattttggaggtggaatcaacacaatttgaagatggcttagcaaaagaaggaaagggaagatcaagaacatttcccaggtgcatgcattgagcaattcactagctgggatgagaaagacagagaaacagggtggagaatatggggccacccaagaaatccttataacgcaccgaacgcagctcaggtaagacaccatggggctgagtgagaactacaagaggaaaagtagcttggggtaacaagtaagaagatttgggactggatgtgggaggaataagtaggcttcctgatagaacatgtgtgtgcacagttcacaccacacggttgagtgcgcaggcgcccagaggagcccttggggtgctctcctctgccatgccatgtgcccgcaggaggaggccagtgattgtccagcttttcccatgagcgaaaaacccaaactttagtttggggaaatcacttcatttaaacaagagaggaatacaacggacaagacagagaatagaaatgtaaagagcggaggaatatcactgaagctccatccgtgattctgcatttcaatctggctttagtctctgccccataaatatttcaaatacaacatatataaaatgaaatgtatgaaatgtatcaacacctgctctggagaattttcagttaaacatggcatattgaatacactcatggacttaccacttcttgctcacaaaatgtttcaaaggcacaaagaagcccatctctacaaggaaagtgagaaaaaaaaaaaaaaacaacacattgacagcagcaaaacttgagaagctactgggttaacagacaactggaactgacttagcagaattgataaagctgaaatttaaatgggtaatttgggaattcgtgaaacaagccaatttgcagcacagaatcccaggaaggctcaagagcaggaggcctcagatgtgtgtcaaaacatgtgaaaacagtgctccaaaaaaaagacctctgagaatagtgaataagacaatttcacatcccctgacaccatcccctacttgacaggagaggcactgccattcccacattccagcaatagactggaggctttctctccagagatgctcaattagactatgggatgctgggctagcctacattgagattaaaagaaaatatacattctgaaaggtggacctccaaatctccttttcctacttggctctgagaattcttacaggaattcttattacactcaggaaggatattagagaattcttagcagaggaaattcaccagaccagagaaaatgcctagagaagctaaggcaaggaaccagtaacaacactgtccagcacatccatctgcaatggaggaagctgtccacccaacggtctgtccctacaccacataaacctgtacattttagttctctagagtatgagaagacatcaaaggccatcaatgacttagaaaagccattagtggaagaaagatcaaaccaacaaaaaaaaaaaacagaagcaagtagaagagaaccttcacagagccttaccaccatctcaaaaccccttctgtgtctacactcacaagctctaccagataattgaatcaagattcctgtaacacgcagaaagttatgatgggtcagctaatcttttcccagttatgattttcccaggtattgcttttaatttttaggcaatttggaaaacttgggggatacagtaggtatcagtgttttgcctcagtcttattctgtaaacagaataagaagcttccatcttattctgtaaacagaataagaagcttccatcttattctgtaaagtgaggtctttgtgcattgtgtagtacctggtccgtcatatgttctcagtaagtcagtcaataatatagttgttaatattattattgttaaataatcaagaaaacataaaaaccacagaagtacagaaaaaggttaaaggctattactttaaaaatctgattgtccgaagcctggctgctcccacaaatcaagaactgtcatttaaatttctgaatcaatgtgacggcagatgccaaattcagtaacacaactattcagttatgcctctatctggttcgcttctgtaggtgataaaaagtggtcaaacactctttctgcccagatggaggttatagtttagctcaccgagtcatcattaagggctggttgagctgacctgaggattttgccagactaagagtcgctgaaaataccatgaggacaattaatttgttttgatcactagacataaccacaaaactatgggcaagtgaaagttatgcaaagcgtttataatccaagtcctaaaaagacatttcttaaaaaaaaaataatttgggctttgagaagctgaagttagattaaagcaaataaatagacaaaaacataataataagaagaactgacaacaggcttcctacattggacattggagagctgcctaaacagctggttccctcccgccctgccctgagcatctgtagtagcaagtggctcagtaagaccttggggaaaggagggcaacgccacccagaggagcctccgggagttaataaaagtcacttctgcaccccgagaaaagccacaaatgaaatctttgcttcttgaacatttatctttttctatcaactgacattctgagcatccagactttttgcctcgaaattcacctgcacactcgtggggactctgaagaacactgttgtctcagaacaatttaaactcctacctgtagtccatccatcaagtaaattcagctgccgccaaggtaagcaggaaagggcgtcatcgccagggatacgtgacgaataggctgactgctggcccagaccatgccatggctgggaaggataattggtagagatgattgcacagggcgtaatctaccacaccactgctcgttaataaccaccaggagagctggcctgcaaggcaggacctgtgtcacctgaatgttcatcaaagcaggttgattgaccatgggaaagaatagattagcagccaggactcagcgagttaaaccccagtctgtctgtgctcttggaaaaatcatttgacttccagagcctgaatatttttttgttatctgaaaaatgaggaatttgggtcagattctcagaatatttctagcaaaggtgacctagtctgatgcaaattaaaaagccccttggccaataacaaccagtgaaactgttttctttttttgttgagactgataatgaacatgtaaaggtccctaaaagtcctgcatggaaaattaaaatgcttatcactatttctcttccagacggttaataacatccaggggtcctttgtgcttgaacatactagtccaaccacttttgagagcctttctagtaaaattctttaaacccaaactcgtatcccgggtacgttattttaacaaaacatgcatacgtaaccctactcaaacagggctaaaggctgatggaactgacctgaggattttgccaggctaagagtaactgaacataccatgaggacacttaactttgtttcgcttactacacataatcacaaaactatagacaagtgaaagttatgcaaagcgtttgtgatccaagtcctaaaaaggcctttttcagaaaaaaaaaataatttgaaaatgcttgcacacgtttttccataattgtggtaaaatatacaaaacattaagatattttaaccagtccaagagcacattttggcagccttaggtacatgtacgatgttgcgcaacagcacatattttgatgccaattcaacttcagaaagtcatatttaaatacacctaggaaatcttttaaagcttattctcagaggccaggttggggaatagttgctctgacccatctacactctcagttcagtgtctactaaatgccctcttcgcctaagttacccggctaggaactcaagggaagaggaagtcccacggtgcttcagtggtgcctccggagttccaccactttgcaaaggttatgacttcagactgaattttcatccatagtgaagagggagataagtggatagaattccccactgctcaatttcagatgcatggagatgaattactaatatagcttcttttttcctccctagcttttggtgcattctccccatagtattaacctgtagtactcaaaactcttaaaatgttaaaatgtgtgttcataatattcctcatcatgggaggatatatagggcgctgtggctcacgcctgtcatcccagcactttgggataccaaggcaggtggatcatttgaggtcaggagtccaaaggccagccttcccaatattgtgaaaccccatcactaataaaattaaaaaaaattagttgggcgtggtgccgtgcacctgaaatcccagctattggggaggctgaggcaagacaatcgcttgaaccctagaggcagaggttgcagtgagctgacatcacaccactgcactccagcctggggaacagagtgagactccacctcaaaaaaagaaaaatcctgaaattcattttatttgttcatgtcagggcaacttcattgtactatttcaggacacatggcaactcagcgcacacctccataaaccagagacggctagtgaaaggagaatcaatgacaaaccatcattttcttcaaaatagaaaaaaatattatttaatcatgttttaaactttcttttctgaatcatcgagacttgatgttattttaatttccacctaaaatatgtaattaacaatatacatcgtgtttctcatgaatttctagttcgtaagcctctagataagaacattttcatacattattctgatgagtatttgtttagaaataacaataaaatacaaaatgcttcaagtttatataaagcaactcatcacttttttttttttttttattcctttttgcctctattttttcttcttccttagcatggctgttaagagcctaaatacatcacatttttatttgggaggaaatatgctgttgtccattttcctgtctgatctgcatcataaccagagaaattaaaagcaggaaagtggtgatgccttaggaaactgtctcaccaggcaaggatgttatcctgacaaattgccacaacatggcggcttctgagtaaaggtttcaatggggccaatctattcaaatctattcagagtgaaattaatattttattgcatgacattcttagatgtaaagtggcacaatatgatcagcctaaatgaaagttttaactgtgcatatatttggattcttctattaagattgtaattaattataattgtctaataatttcttatttggtagaatttatttgaatgtgaatttcatgttgagttatttgatagattcaagttcaagaggtatgttaaaataaattttcccatgaatatttagttttacctactcaagtaagctggaaggttagagctgacaggcggacacacacacacacacacacacacacacacacacacacacgccaacacacatacacacttgctagcatgagagtttcatttttctgttacttggcatcttactcttagcaacttaaaggagatcattttactaaccactctttaccttgaaaggatcccagcaaaaacaaaaagtaaaatagtgtattaacaccttcaaaagtatttgggtatttggataaaatagttgttgacattcaaaaaagaattagagaccatcaaatactctacttaaaaatgtatttatctgacataccattttgcatatacaattacaaccctctctgaaaagatgcagaaataaaacataacatgcagaattaattcagcacacaaaaacagcaaagaattaaaatacttgcaatttagaaattttacaggactttgcagtaacagaacctataatgagtcaaaacaattagccttgatcctaaaaaatcatggataccataagttgaaaaaactaataacttattaaaagggctgtatttttctgcattgatattctataacatcaattacttcattaaacaaaataattacagtataatcatagaaattagtaaatgtattcctttaaaaattttacgtcctctttaaaaaagaaaaaaaaatgagtttttaataatcagttaacctggcactgagctttaaattgaatttaagaaaaaaacaaaaactctgccccattagtgcaagagtaaagttgggttgttgaaatgcaaatgcaaatgcatgtagtctccccctgtctttagtttgggaataagaaatacatatttgaacgtaaaggattttttgttgttgttgtcactttctgtttttatttcataaggctgcttaacagttttactttagtttggagaagcacagttctgaaaactaaagggggtaaatcccgtcattatctctgcaggtgagatgggtctgtatcaactctaagactgaacgactctgaaggtgaaataataaatgacgcatgcctgaggtcttttctgggaaggaaatcgcccccaagagaagggttttttagcccagaaagcactcaggctgcctctttgcctgccctcatggttgctgagggacgtttaagtcaaactgaaagtactgcatgacccgatgagaatcattaacctcattagcaacatggacgagcaagatggcgaccacatatcccctcggtctgccttgggggctgtcgtggcctctcccaccactcaccacccctgcctgtcctaataagaggtctattgtctaacattttaagaaccctattctatccacttataagaaccctgttgtcttccattataagaaccctatggtcaaagcctagtgtatgacattcagaacaagaaaagtttctgaggagtcctgtgcccttgaggctggaggagcgcattaaatccacacattatagacctaactgagaagcaggggtgccaggaagcataattattcagaagagaagtcccacagcccccgacctcaggattccctgcacattcagtcagacactcggccttcttcctaccaatcattgccagtgatcctcctggcagacacagcctccatcctacattaaaccccacacctggagacacaccctccaccccacattaactcccacacctggagacacaccctccatcctgcattcaatcccaaaccaggagacacaccctccatcctacagtcaaccccacaccaggagacatactctccatcctgcattaaaccccacaccaggagacacagcctccatcctacattcaaccccacacttggagacacaccctccaccccacattaaatcccacacctagacacacaccctccatcctgcattcaatcccacaccaggagacacgccctccatcctacattaaaccccacacctggagacataccctccaccccacattaaatcccacaccaggaagcacgccctctaacttgcattaaaccccacaccaggagacacactctctatccttcattcaaccccgtaacaggagacataccctccatcctgcattaaatgccacagaaggaaacaccccctccaccctgcatgcaatcccacatccaggtttccttggctgctgtatcattcccttcactgtaaaaatatttgccttcctgtcatcctttccagtcacaggccctggtgctgctggccctggcagtaaaactctttgaaataggtgttttattctctgtctctaattcctccctcccattttcctttccagttttcctctgaaaccgctcatgtcaaggttatctatgccccatattttgctgaatttaagcagcagcacctacactcatctcaggtcacctgaaagcagcaccacacagcttccactgtatcctcccccaactgtctctggtcttccagtcaaccctgtatcttggctcttctacaacccactggctgtacttttagtatccttggcaattctcttctctgtcagatcttttttttttttttttcctaccctcacttcccaagtaactttttccagtctcacccatttgcagatgactatcgattgttttattttattcatttattatttcttttttcttgagatggagtctacctctgtcacccaggctggagtgcagtggtgggatcttagctcaatgcaacctctgcctcctgggttcaaaagattctcctgcttctgcatcccaagtagctgggacttcatgtgcaccactgtgcccagctaatttttgtatttttagtagagaccggctttccccaagttggccaggctggtcttgaactcctgactgcctcggtctccaaaagtgctgggattacaggagtgagccactgagccaagccaggacccctgattttaaagcgcgaacctggacttttccatgaaattgagacacatatatccgactgtcttctcaaccacctgggatatcagactaagctttcccaaacctgattcctgatgcactcccaagtgtgcttttccacacagtcttcccagcttgctagagaataactccctttttctatttgggcaggacaaaaacccggagtcaacttgtattcctccttttctgtcaaataccaaatcagcacattggccaatttggctagtcctactcaaaagacgctgagatgctgagcaatcctccccacctcattcttcagtggcttgagccaccattatctatcacctgaatgagtccaatgtgcttctttcttatccacttttgtgccatcatcaacaaagcagccctaagattctcttagatcacaagctagatcatacctaccacaatcactcattatcttttcaacaaccttacagaagacccacaatcaccaacaagcacttaccaaagaaagaacattttgtcttcatataattctactgtagcttttttcctcttatttctcacacttacccagcattccccatcctcagcaccttacaggacctgtttccactgcatgaaggctcttccccagatgccctcatagttcactcctcttctccagctgcttaaaggccatcttcttagtgaagttcgttctcaccatctgatgtacagcctcagccccttcctcttgcttgacccaccccatcctctgccgtcctgcttctacatagcatatcacaatgcgacccactaagtgtttcatcactcactccttccttttttccctcacaaacgtatgaatcccaagagggccgggattttatcgctttggtctgtgttctgccccagtgttgaaatctgtgtatcgctttgagtgatactcaataatatttgttgattgagtgaatatcttacattctaatatcaagagacttttacgtcctaaagccgacattataacacttaagtctgtaataaatgcatatgattttgctattcaacattttaaacataagaacatcttacgtgcgtgcgtgcactcaggtgtgtatacaagcttattagactacaagccttataaacctttttctaagattaaatcatctcagaatgtgatgacatattgcagtgctgggtatgtttgaattgatattctgagccaaattatcttaagatctagagtttccctctaatcttaataaatgtttgtgttgctctacaatagatttatatcgttgagtatcttatattctagatttatattaaaacatttaatcctcaattaatctatccaattaatccatccattgcataaagcaaatcaagccgagtaaactctggtgacctacctgaggtcagacaactaataaataaatgatcttgtatataatccaaggtctaacctgtgacttaacatatttattaaattatatcccaatcaataactattaaactctgctcaaagtagatataatggttactgtcctttcccacatacagagtttttaggccagttgctcaattatattggacaataaagtccaatcataaaacacatccttaatgttcatggctgttatgtatcaagatgtttttaaacccccaaatttgtgactaccaagtagctcataattttctccataaatattataaatttttactgcctaatagtaattttcctagacctttaatgactataaatataaaaccgattacaagctattgaaataaattctatcagtttttttttgactttcaagtaatttttacctctcatacttcagcagcttttgcagtgtcacaatgtattttttgtggttaggaacaatcgattatagattctttaacggcactaacttgagtcaccaccaaattcaatattatatgctgtgattttttaatctcctgtttttttctacttggaaaacatgtgcttagattatttcatttgcaacatcagtactagtattttgtttcatcacacacacattcacagagcaaaaactatccaacttgctaccgtgggaaaattggggaaagcgtttttacaagggttatcctaaattaagcatttctccaccaaggatatatgttgaactacagaagagtattacgaaaactaacaggatattgatatagtgaaatgtttaaaatacacatcaattgcgcattgagtctaaatgaaaggcattgtcttatccctctttgaggttactgccgccatcatggaaggaagccatctgttaccagaggcagtgatgctaagaaaagcgtgtgaggctcagagtcatgggtccaacctcacatatgacttcaataaatcacctagcattgctggataattttcctcctctgagagaataggagcatatttgtctcacaaagttgttacaaaaattacgataaaagtgataggtgtagagatcagacattagacagtgaactctctcagggccagctctctcacgcccttcaattaggagacataagaaaggtctgtaatttttttttggtgttaaaggctaagcaatgacaacagtttgcatgtaactattattgttataaatctgcatacaatcccccaacaaatgttgagtcagatatcttctttactgcaggctctgtctgataagtaggctattaactacaagctgtgggcttatgactacagttaataagccaagtcttaagaatgtgactggtagtgatggaccatggaaaaagtaaataacactgttggccatgccacagcctcagtccccatactcagggttctacctaacaaaactgccagtataggaaaagcacccagaatatctgtacatgtatatgataaaggatcaaacacatcaactcctaatacttgtgttttactaaaatttctgaatctcatacataaaatatgtgttttccttcttccttttctacctcctcctttctttcttttgcaaaaggctaatcattttgtaaagcaaagccatcgacataggacgtaagtatgaaacaatatgttggcctgatactatgaggtgttagaagagcgaagtagtaattattgtagtacttgatcacattcatgcttctgatactttcaagattttcactttactattagtttccttttctaaacttcaaaatccaagtgtattgagaaacacttgtcctttatttatttgtttttatttatttttaagacagagtctcgctctgtcagtcaccaggctgtagtgcagtggcacgatcttggctcactgcaacctccgcctcccaggttcaagtaattctcctgtctcagcctccctagtacctgggattacaggcacccgccattaagcctgactaatttttgtattcttagtagagacggggtttccccacgttggccagcttggtcttgaactcctgacctcaggtgatctgcccacctcagattcccaaagtgctgggattacaggcatgagcaactgcgcccagccacacatgtcctttaaattacacactacctatgaagaataattgacttggcttttctccactcaaaaatgagaaatgtgaatgactcttgtgatcctaaccacagtgtcatgtcttgctgcaaattagatgaagggtatttcatcactaaatcttactttcttaactaaaactctcacctaaactgaaggagacattttataaaagtgtcatgtcaagcatgatttaacagtcgtaagattgccttaattcactgctatctggttaaaaccctaattgacgtttggaaatgaattgaatgtcaggtgcctcgaaatctaaaagacaaacattactttatttatttatttatatatttattttaggggcaacaatcttgaataagtgtaaaaggaggaaaaggatattgaaattcacaagaattctttgttccaaaaagttttctgcagtcaagcataatttggttattcataagaaaaggaggaaacaggaagaggatagacgtggtgtcatgtctacatgcacctgcagatcaaaaccacaaggatatgttgctctaggtttattaaagctcattgttctgtgcactggcactgaactgcacagttggaaaatgctatcacttatccacaacgttccagcttcaagaacaatgacatgcattttaatagaagcaacaacattcatattgaaaacatatcattttcttcaattttttctttttctttttgaagttaacactgttgtgacagggaagatcagcttctttgtatgcagaagtgcccactctccgccagccacatctcaaatttgaatgttaaaaacctctcttcattgacatattaaaagtacctacattagtttttctcagtgactaagtactatgttctgaaagtgttttccacaaaattcatgtgttgaaaacctgaccccgaatgtgatggtatttggagatgggacctttggaaatgctttgattaggaagaaggagctttcatgaacgggattagtgcccttataaaagaggacgcagagagctctctcacaccttccactgtctgaggacacagggagaaggccctgtctatgaaccaggaaatgatccccaaccaggacaccttgatcttggactgcccagatgctccagatctgtgagaagcaaatttctgtgctttataagctatccaatgtatggaattttggtacagcagccccaacagactaagatattaataaaataaagatgtaagatctctgttgaaatgcacaaataatatctgagaagaagtagagtatctttaggatatttcatgaaatttcatttgagttggttaattattatttggccatatataaagaatctaatcctgagaatttcaagcggaagccatatccagtacttggatgaaccaatgtcaccctaaaatgccttaatgaggtgagactaatgcatggagagcttaaggtaaaacggcggggggtgggggaacatgtgatcccttctgcctgagaggttctggcatctggttaagagtctaccatcagccagtgaaacagataagtcaaccattaacccctgcctaagtactaacctacacaagtacatcaagtgctacaggagttaaatgaaatggaagattattcttcataggactgagcacagattcccaggagttaactcttgacttagaccaagaaagatgaacagaaaagacatctgtaagcgaaggctgccaccagactaaagcaggaggttgtgaatgaacaagacttacacgaagtgatctatgggacccatccatagagctggcgattgcagacacaagtttagaaatgggccgaggctcctgaagcagcctctctgcaggagtggaagatgtgtggcagccaccggcattcctgaaccacctcagtctgctcttccatggaaactacctttgctaccaagacgtccatttctctgtgtggccatttgagacctgcttatccttgaggtctgaattcagcagtctacactagatatcactcctaaatgttcctatcccatcttttggccgttcctttagtacaattctgcgctgcttttttaattgagtgtttgtatttacactttattcaccattttattctaggacatggaagattgcacctgacgaatagatggcaggtgctaaataaacacttgttaatgaatgaatggtgtggtgtacggccacacggtgtcgctgctgccgctgaaaactggagtcgtggctgctcccagaacaaaagatctgggctaacttgcccccagataatcatgagaaactggtggttggagagataagaacagtctctgcactgtgggcgccttcttgctctgtccccacgtagcttttcctcggtgtgtgaacaaaaaacagaaatagacctctgtgttgtctgttgtaactgatgtgctaatcttgattctaagggcggggtgttcatgacctcatggaatctcaattttatcccaaaagctctaaataccatcgtattggtgggagttaagtcttcaacattcgaatttaaggggacgcattccatccataggagtccctttccaggggacttcaagaatagaaaaattatgttgctttaatcctagaaaaaagacttcctccgtctccacccacagtgtgtgtgattcatctttcagaggcatctctctcctgtccaaactcaagaatggaccaagggtgcaaaaaagaaaacgaacaacatcatttttgttagatttcgtaggctacatcataaaactcacatacaaaaatgcactggaaaaaaagaaattttaaaatttatatagccattcatactcattaatcaaaagacgtgttttgttttttttttgtttgtttgttttttgtttttactcagggtacttagcacacctaatgctctaaaggctatgtagtatgccatgtccacaagtacctgctgagtgtgatttggaaacctaattcacatgctttttagaaaacaaatcttctaagtaatggtacatacatgaatctactcaaagtgctccgaatattttcttgtgcttttataaagaattccatctagtcttttctctcagggatctcatgacactggcctgctcaacttactgaggacctgaaatgcatcgacccttttaaaatgggtcagcctgttgccatgttttcctgaagaattttatttattcttgtgatatgtaagttctcacatgcaagtgtaatgaggaaaaaatgtgtcccccatctggacccctagtctttttctttttttctttgaaacatttgtttttgtaacttgagaacactcagaggagaggagacatcctgccatcctttgattctaactgaggaatagcggaaccggctgacacatcccgtagctgagccgcagcttccgccaacaaaccatttgtgtttaccgtgaaattaacctagttgccaaaatgctaagctacctagcaagtgattcgtgataatcactgtgagcaaagaggttaatggatattgttttttttgtttgttttttttttttttttttttttttttttttgtaatttcattttttccaggtttcctgtaggcccagcacagggcttcaaacggtgggataaaaacaccgtatgttatcagtaaggtcttcgatcaggaactgaaatgccacggacaacacatgatgtacgtctgcgggaattcatagatctataatccatcgcatcacctaccttcctgaggggctttatttgtaattggcacactgatcggaattcttacagaaactagaacgcaggaaacagtatagtatagtagtttagtgcatgagtcacacaaaccaagatttcatccccactcggagaaaggggtgaagacgagacgaagcacccactctagccagtcaagaatttttctcctacaccccgggtaacactgtgacatttaacaacaaacacaactggctgtattcatgggccagagtaggaatctgagatgatttgctcaaaaaagttagcgagatttcatgtgacttagaaaaattcaacgtgatagaaagttttcaatactaaatgagctgacaaatttaagcttaggttctaaacctacctcttaaaagaattcagccaaaatcaatgttaaaataatgaattgcatgcttatttaaactcttcaagctttggtcccttcatctgtaaaatggcaataatcactgtgccttcgaagactgctggattaaaatggcttatctcaatacattttacaaggtgggcaattactaaatagtagcccaaattattaagtctatgttgctttccaaatatagaagtcactgaacaaaatggaacagaagcatcagtgacaggccaggcaatggtataaattcaatttccaggcctctcagctaaaattgtaatcagaaacaagttcaagttcagtttcctcaggaagcagttacactgaggaccaactattttctcacacacacaagatcttaaatcgcgctccattgcttcatggatatatgtgttgccatggacagataacaacctccttatgattacgcctacaattttattcttcactcactatcctccatcaagaactagctactttgcacggaagccctaaagaaattcttactgattgaaactcatcaagctcccttcgcctttccatatttgcaccaactttgcaaatcaattgtttaattttttccgaagtagacgtcctgccctttggtcctgaagagattcagagtgagggtgtttatattaagaaacaaatattgagagggaatgttaactccttgaacagtaaataaactaatccttcaacagaaaacattatttctgagactcagtttccgtttatataaaatgaggtattgatacacacccaggcagttttttgtgaatatttaatatgtataccctaaacggtaagagctttgaagtgaggaataaggtaatatggctaaacggtcttcactcttgaacatgatgctatactgcagtcaatactacttttttttttttgtttttgagttggagtcttgctctgtcaaccaagctggagcacaatagtgtcatcacaacttactgcagcctcaacctcctgcctcaccctttctagtagctgagactggaggtgtgcaccaccatgcccagctaattttactttttgtagagacatggttttgctatgttgaccaggctagtctcaaattcttgggctcaagtgatccttcttcctcagcacctcaaagtgctgagattgtagacatgggccacagtacctggcccaaaaataatttttaaaaagggaagctttatattgtattatttttttctggacaatgccttatgttccttaaacagaagtctatctaaataataaaatgtgaagctttcctctcactggcggagaagcagagtctccaggagttgtctcctgggttggctcagggtgacagaggcatgcacaggcctactgggcgggacgaaccacatcatgtgctttccagcacgttgcttagtttttctaccctaggaggcctcaagagattgtaaacgttttaagattgagacacaattttttcagtcatgtctgcccctggcctaaaaatgtctggtaagtccagtcctggaatcccaaaggacatcttagaatgccaagtacgtcgatattaacacactcccaccctataaaatgggctgagggtcttctatgtgccagaccctgtgattctttcactagggactagagacatgaatgaatgtgcttcctccttctcagcttggtcctcctcagcatgtgcgcgagggtggtcctccagctcccagcaaggactggggcagcccaaagcacatctgctaactccgccctgagcacacatggtataccctagagtcacaaatcaatactgtgattccctcatggacaaagatgggagcacactgccttagggtaaggaggcacattaagaggtgactagaggcacaggccccatggtcagacaggcttgaggttgattctgctggtgattagttagacaatgtgtccatattacttaactctaaaggacttcagtcttctcacttaaaaaacaggaagaatgaaaccaatgaggtcattcctgtgtcttgaagccaacaaccctggactatccttggccctcaatacctgttagctgtttggggcaggtcaatattatccttctcttgcttccaattaaagttttcattgccattacattcccagttgggtaaagaagacttaggcagtaacttttgtaaatgctttggcccacactcaaagtcatactaataagtacatttttaaaaatcgatagcaaatgcaatttttttagcaaatgcttttttgagtttctaggttaaatttattaatagttctacatatgattttctaccctgttcttctgtagagagtagacagcccagagtcccattttcctgcttcccatcactatggctacaggattaggttcgaaaatctgcttttgctgaaatatcacacatccctgaacaaaaataacttcaaatgtttaaacttatgtcacatagtattttcttaagggagattatgtgggttaaaacaatttactccccaattaaaatcattacgttctccaccagagttgaatgaactatcttcttacattagagatacagttgagtctcacgtttcacatcctgccaaactcagaattccattacagtggatgctgaggttggatgtactctgttgcatcaacttcttctttttgtgtgggcaacaccagtgctaaggagaagattcctctgcccttcaaccttggtggaactgccaatgaagctgttttctcatttggccatggttgggatctatctaactgtgattcatcttaactcgtctttctcctggaggctgggtcctggagccatcagtgcaaggagagatgtagcaccctcagatcagctgccccaccccagtctggtcctcagagctggttttggtggttccaaagcagttccagcatgttatgtgccaccccataaccctccagtaaatcccctagccacctgcctctcttagaaggcatttccacctagagaacccaaactgctgcagccatgctcggggtcacagagcattgcattatgttgggtggcagaacatcgcattatgttgttttgggaaaactggttgctttattgtggaaaggtgggtggtggtttcttaatgatgacaatggtctatctttcacgttagttccattctcacagaaaaggtcaagatatttacacaatttctgcctgaatgtgtctacactattttggaatatagtgaaaaacaaagtatccttatcctttgcagcattagcaatttgcataagtaaaatagagttgaattagtaagtcataacaaaaaataatgcacttttaaatccaaacctcttttaccagtgatttcttaaaaatacataaggcgtgttctgtgttttcaagaagtcccacatatttcttgacaagaaaatcatgcatttttattactcaattaagctttaaataaagcttcttaaatactaaaccaaatgttgattgttatttttctatctaaaagtaaaataaacattatttaatcccagatttccaaataaacaaggccactgaggttcccataactgtgattttgacaaccggctgcagagcgtagcttgtgctaacctgtttcatgaggggctggcagccttttcactgggaaacctctgattgctttgacccttatcaccttgtacaagttaaacttctggtgttgctgcatctttgctaaaaaggaaactcctgcattctggctatgccccattttgcaggcatcacagttgagcacctttgcctgctctgatccctgtagacttcaagattcacttgtgaacttatttccacatctcagataacaatctaaaataagatgaaatgacacaaagcctgcagcaagaatctggaaactaacctgattgtgtagtgtcctcttagaagcctgtgcctcctgcctttttattttatcttttagctcaaaatgaactcctttcacactgaggatggctatccaatctcattcccagtgcctttcaacaagtactccccttatacactcctggctcccatcccctaatgtaaatgtaccacaatttaaaaaatgcagttgatgccaatgttgctcttccttttttctgtgccctttgaatttaattttttcttataataaaagtgacagccaaaaatatccatactatctatttttttatttggtgtctatgtgagggcgtagcatggggtagcattttttaaaatattgagttatgtattcattcaggcgcatgttactgtaaagaaaatagtttaaaattatttttccattaccaacttctgacaattataccttctaaataccctttaagtctgttcaattatttccagccaacgtctcagtgaaaacccatctgactgactagtgttatttcttagtcttttaatgaagctacccctatggatttgatcgctgaattacttatcctctacatagaatcctctaaacctgtgtttcaatgaaccctagcttcactgatggccctacagcttgtcttcttaaacaaatgaaatcctgatcgtgaactctccagtcaaacaaagtccatgacttgtagcacactagaatagaatttgacacccttcatatacaccacagggccctaaataatctcaccacaattcattccctttacctgctgtaaccccctggaacatatttcacgcctttgcctatttttccttcagttctcaccttcgagtagcaggtcctcagggaaacccttcccacttaagtacttgctaaccccatgttaaacttcctcatagcactttattatctcagtcactacatctccaactgcagaagtcgcttcatgcagtgaggatgtgtctttgaatgtctgtgcccccaggagggcagggtctctagtgcaccactctatgtccatgcttagcacaaaagatggacacagcggaccctaaatacccggaacacaagtttagaggatttctatgtagaggagaaataattcaatgatcaaaatcattacaaatggtatttcttccatccagataagaaatgggatttggagtgattttttttttctttttttttttttgagacggagtctcgctctgtcgcccaggctggagtgcagtggcgtgatctcagatgtctgctcactacaagctccacctcctgggttcacgccattctcctgtctcagcctcccaagtatggggtgatttttaagtgcaaaaaaagagagaaagatggaggcagaatgcaaggcataaagacaacatcgtgaagctattttatactgtcctaccaattgaccagattcagtataagttttcaaacggattaacatgccaacagtgctttaaagtaaatgagaccaattcatctgccccttgttttaataccttttgactttgtgaaatgaaaaagggtaaattaacctttatcaccaggcagaatttttgcatcatcatgaattctcagaatgctctaagaattatatgtctttcttagcatatatccaccaaattagacatccttctcagaatggtatattaaaaactttaaataaaagaattgtgatttttgatggaaattagataagaaatttgccaatctttataaacatcatcttctgtgaatgctttacagtgaagggcagactggaaaattcatagtagtgtaattacaagtgattagtaaacatgaaaatttgcaacctccctaagtaatcaaagagctgtaaatgagagaagaaaacacttcccccacccagcaaatgagaaaaggataaaatgtatcataatacttcaagctataataggactattgttgtgagcataaattagcagagacttcctgagagcaattttcatatttattaagtatcttaaaaatgttcttaactagtctttccccttctagtaagttgtcttgaaaaaactcagaaatgttaatgaatgtatctacaaataaaccagactactgctagttcatgaggcatctttgtgtgtttggaaatagattccctccttccaggttcacagaccccaatccagggctcactctgctgtgagtggagcccactctgcccagttgagtggctctcctgcagggcacaatctgaacatccctggatggaaagatggtaatttattcatttataaagttggaggaaaccttcattcaccaacgacatgtgactattagtgaagtcactaggtaaattagattaaagcatcaggatgaaatattaaagtcattaaaatgtatgttctaaaactttttctgacccagaaaaaaagatcaatatataacattgcatgaaaagtcaaagtttaaaattttatgtgtagtgaaggcactaacttgttaaaatgcaaaggaaacagactagaatggcagaggttttatctgagtacacgggtcaggggtagttttttcctttcttgccatgaggtcttagaatccggaacatgttcactgtggaaaatcagacaaattgagcagttggaaaaaggagaggagggagagtgcttgcatggaagcctctgctctgggctgaggaggacatggcagagcgattggctattaggagagtcaggaaaggggagatcaccagctcaggtattttcttacctagtctcatgaactaggtctgaatttcatggtaaaggctcttggctaaatctgaaattgctgtactaaagctttgaaaacctatgcaatgccgagaggggcccaaaaaacagcttgacttggagagaatgactcatcctctactgaccactttgctccttgttcccctgtaactgacactcttcccagattcggcttctagccagtatgtctactcaaaacagaaactttctaattttaaacagcaggcttatctttgtaaccagagaaatggggaaattacccctaagcaagcatatgagtaaataagttatgcaaggagagatgtctccatgactatttccttaaccaccgaaaacacagaaaattattacagtttcttaaaacacatgtgtgatattgcaacttaatttttgattaaatttccatctcatggtatcgtacatccataatctgagtccacaaaaaagaacactcattttgccgtgtcatcattctagtattcaacgaggaaagaaagaaaagcaaatcatgacaaggtcatctttacaatgaaacaaagatgtataagaaaacagagtagggactgtgttattgccttgatttgtggttcctgttttctcccataaacacattaggttagcagagagtttgcttcccaaagtgacttcctccaactacaatcatcagtagcaggtgggaacgggttacagtggcagaatttcagtccctgccatggagtgggaagctgcattttaacctggctgcaggctctttgtttttatgttaaagtgcaggtagtcctgttgtggacagctctgtgcatctgaagatgactactgggtgctgtgcggatgagtttcgcgcagcacaagtagatttgtgctacaggcagctctgcaagtttctggtagaaccgtttaggcttagctgagctagaccaagcagcagcaacagtaacagctaggcttgaaacgttccacagagcacaggggcactgagagcaggcccccgggtcttcgggaaacactatgcagtcttgtctccatgcctgaaactttgcctggagctccaagaactgggattttaataggtagaaagacctagaaacggatgtttttatgttaatagatcttcataaaactagtagaaaagcaggcctgtatatttttgtcaaataattttttaaaaagccaaagttataaatgtatgattttggataacctaaaaatagtttgaagagtgttagcaagtcaaataaaattttctttcttttttcttatcaggtttaatgggaaaatactgcgtaaatatcaactattgtagatctgtctcccagaaaaacagtgcactgaacatgacaaatttcttcaaaactgatccaagttattacatgacagatttaaattgtgttattttcacacatcattcctctatgtctagaaaactcagttacctcaatggaataatttttttacagtgaagagttttgctacttaaagaaaaagagaagggatattttatacgtatgtataaaatatgtgtatatatgtatgtatatgttctgacctccttctggtgtcattgtaacaagatcccctagggatattaaactcctgatagatataatggagataacaacatttaaatcttccaatttgtcatcaccattgcttgaaaacaaataaactttaaaataaccaaaagcctggagtggaagtaaatcgacaaacatcaaaaagaatcacatacacatttaaactataaaaccaccattcattagaaaatgtgtattatagctattttgccaacctgtctggaatgaataacgaccctcaagattttcaatattcacttcacacagaatgttccatggaaatgcctgggttcagaatctcattccccatcttattagtggcatgctgtcaaacaagtaacttaccactggttttctgaactctaaatcggatgaaatcaagcacctgcattacgcaatgaattatataactctacatatgttaacacaacaaacactgcataaaagtatgtacttgggcttgtgaggctgcagagggttggggtgggaggaaagattgcaagtacccagcctgccttttctgacagcctgatccacactctgatgatgcaaagggaggaggaggcaggttaggtggtgctcaacacaatcacgagacacccaactcagcaaacaaaaactcttcatgaagagcctaaggttggatgtttcccaatccatggtctctccatgctgggatgctaaacatgaggtgtgtagaggaaatgtgagttcacaatcgatcagctggtcaacaggttcctctggtcaacaatgtcataatcaaaccaaggaaatcttgaattcagataaccaatctaccccatatgaatgacaatttaaattatcctatgtgaggtaattttttcaagtgctctaagatatacacttcttggtgactaagtcaggccgtatcacccaactctgttttcatatttcctattttcttaacaaaattaggcaaaaaattattgacaagtgtgcacaatcacatcattacataatcacataatctttgaacataggacatctcacagggtatacttttcatacatggtgctttagctaaggcgttttctcaactcattaaaatgacttttccttctaaacaatacaatctatcagggccgtggacagggatggtctcatgaacatgcaacctaggtcagttatttgttgttgttgtttgatttttaacttttaagtttagtggtagaagtgcaggtttgttacttaagtaaacttatgtcatgggagtttgttgtacagattatttgatcacccagatattaagcctagtacccattattttcctgatcccctctttcttccaatattccatcctccaaaaggccccagtgtgtgttgttcccccagtgtgttcatgagctctcatcatttagatcttacttatacatgataacttgtgctatttggttttctgttcctgggttagtttgcttagcatattggcctccacctccatccacgtccttgcaaaggacacggtcagtccttagaagagtagttcttgataaaatattctgcagctgctgttgtgaagttcttaataagttgtagagaaagggcactccattttcttcgtatggtacctcaattatcaattggtcttgttacagagataagagtttttaaagaaaattgtaagacccttgtgaaaattactttttttacttaagatgtttcatgagggttttctttaaaataattatttgcaattctcctgtagaatttgatatgatgggtctagctttgttcagcagaaatgaatttctgcaaatgctgaggcaagcaaaagaaacaaaaaacaacttaacccatttttccttaatttttcattgttttttaatttatcattggaataatgattgtatttatttaaataaagaaaacaggatcaagaagattttttaagacatttgaaatgtaaagaaatgtagtataggacatttgacttgtaaataaatgttcatagaatttagagctgaacactcaaataatctacaaagtgactttttaaacactttttccgtgcataaatgtttcttcaaaaaatctttgtaagagagaatgtagataatattgaaaactatggaaacactttagacgaagtagaaatttattgtattatttataaaacactcagcgccccatatgtgctaaatatcattcaaaaccttaaaatataaagtgaagaagacatccaagggctaccccatgggttgtacggtctagtgaagaaaacgccaataaaaggaaaggaaatcacaccgtcctcaatattgctttcttttccgcatcttttttatgctctataacacagtttgcatagcatttctctagaacaattcctggaacagcgagaaagggaccctcaagtaactattgagtacaatgaccaaagacaaaatcacttagataatcaatgggtggtcaattgtcttctctaccacactgccctgtcataccacatagagtgctgctgggtgtggacatctcttacgagtaaggtagagtcagttgtagaattggttgcatctccagcttgcagttctcctgctgtgtcactcagacactgaagagcagcctcatgaaaaatgctttctatctcaatatttatgcaggctcatgttttctttcggtgtagaaatttactttttcttattagtacccgaagaatcaaaggcttttaagaattccgcataataccaccattcttgttaaatggccctgcattacataattacaaggagaagagcagaggtagatttcaagtaagttatcaccattcaacatgtgaaattaattttgtaatgtatgagcttctgcatttttattttggtacacatactataacgcccttttgaaaatgtatcatcaactgctgatttggaagcctacaactttaaaatagaatctgaaaaaagtactgtgggagccaaagcaagtgcttaagttcactttgtgacattattaataaattctatcacatcgttatagaaatacaatgtacaaatttttcttgagggataaattttcacccagatattaatgtgatgtaggtacattaatcaaatattcataattttttgtcttcttttggaaattgcttcaaccaaccttcagtttaagttggctctccataattgtatatagatttttcatttagagaagttatttatgatcatttgaatgaatggaaattgttaaggaactttcttctgaaattatttttgtgtatatttccagtttattttttttaaacaaatgggctattttgtaattagaagaaaaaaattgctttgaaacttgaagccctggaaatttcatgacatgacatgacatgccatttccaacagcagacagttggcaggactagtccaggaacattcaagtcttaatttctagtccactattctttatacaaacaatctgaatttatatactaatcaatcaatgcatgaaagtttctcccagccaaacacgcttttaccatctcatcccttggtgagtgctggtttgctggtgaaactatcatggcgcttataaaagaagagagcccgtccacttgaacataagatcctaattaaaagtaaaaaggtcagtcgttacttacgaatacttttgaactattcattaatatgtcaacttctaacaggaggattttaggttttgccatagacacattctatttctctttggctaactctctcacctccttcaaatctgtgttcaaatatgaacttctcgaaaagaccttttctgatcacttcattttacaccattaaggaccacccaccatcagcctcctgtcctgccctagacattaccaacacttgtatcctgctcttctttttgggtgatctctatcaactgacattacattacacttattaagcgcatggtttactgtcagttttcctcctctgaatggaaaaatctttgcctaatttggtgactgatgtatcccaatagccaaaaacaattgctaactctcaaaagtcactcaacagttttctgttggaaaaaaaaatccatttagaccatattgagaatgcctatttaatgcatgtagatgcataataccataatgctacttttaatatcataattcaaaacataaacaaacactagaccatgtatttaatgaacttacaacagtgcctggcatatgctactcaatgaatttactattaatcttccttgctgttaggcactcatgatcaccactacagacttctcaacctttccccagttacaccaaactttcgtgggaaaatataatcttaacatatattaagagaatgatagactacttgaagcttgatagtgtcaccaggagattaggaggaatttatggtaacatacatagaaaagggcaaacatttctcttttattatcttgtcttttacttctaaagttatggaaggtaggatgaagatgacctggcaaagccacttgtttctaagaggatggaataaagcggtgttcagtctacggatgtttcatgtagcatattccacagaaaacaacttttgcaaagtaaactaatagtgttagtgaaaaaggatcctataatcacaaccatggagacagtgcgtgatgtaaacagggttaaacattttatttaatgcggaaggatgtagagagctcctctactgacgtgcactgtgactctcagggagacctgaggagcggatctaaccatcttagcttgaagctgtgtattgagagaatggtgttaagaaatgttttctctgctcaacacagtgtggaacgtggctctaggcttgagagctgccagctctcttctcctaccgctgttgtagcgaaataaagctggaagacttggcctcagcagaagtagctcagtactggagaacaaagtctattaatgggggaattaatggggcacttggggaaatgaagaacacagtgtcagtttagaaattcttctaaatggtgctgtggtttgaatgtgtcccctgacccccggaattcttgagttggcaactaaatccccaatgaggcagtgctagaagctgggagctcctgggaagtgtttaggttatgagggctttgcacttatgaatgaattaatgcccatataaagaggagctgggacctactgggaagtgtttaggtcataagggctctgtacccatgaataaattgatgccccaataaagagggctctcagagtgggctacccctctttgcccttctgccatgggatgactcagcaagaaagcccctgatcaactaccagtgacttcattttgagcttctcagcctctagaactgtgaaccaatacatttcttttctttacaaagtacctggtctgtagtattttgttacaacaacacaaatgtactaagacaacctgcaagaacaaaaagcctctctagtgatataaatagcccagctcagcttaggagtcctggtggaattttccatagctgtgcaagctatgaagacagaatgtgtgtcccctaatgtgactctgtgcatagtgtccccaagataagatgctggttgaggatccaatattgtagccactgctccctggggaacatgcgtaatacatgagtgatatttgggtccacgtgacttggtattctgagtggtgtaatgactcttggtggaattatatgtatatcgcccatgaagtcaaccctcaaaagtttagaatggaaagctaattttcttttaataaactcatgtacgattataattgataggtctaccaaaatagtacagcagttccttccacactgtattagatactattgtaattatcagttataattttatgtctcagcaaatattgccttttcagaagtcccttccttgagcaaatctaaagaaagtttgcaaagaaaaactgtaaatatgtataaatatgccagtaactcaaaaattacttttctctgttgaaaggcttaattgtactggttgaaatgttttttagaatatgtcaacaccttgtcactatttacagggtattcctactaccctgatgaaaagagcacctcttaaacaataaggtcttagtcacggctgagctcttttcttcagatgacacgtttccctgaatgttactaggtgaattgattagacactgatatttcctaaatcacagttaatgacaagcatatttttagatactggacacaaattcaagccagtaatctgcaggtgcttgtgaaatgttgtagtcacattttccctgccaaatttctgaaggctacctataaatcatttttttaaaagagaaaagtataaaggtatacaaggccaatgaagaaaggaatataatagaaagtgaacaagtttacaataaataaaacctataacagctaacaatatatgtttccctcaccaatcacatgggtatatggaaggctttttaaaaaaaatgttaaaaagtactgtattacaagaatgtcatagtatttgcattatgccacatttaataaaatgtaatttaagagtttggaaggttttatttaaaagctttgatgtcctcctataaagttcttgtattttgagcaataacatgagacaagacccaaaaggcaattaaggcccctacaccatgcagtgttgtaggagcacatattagaagacaaaggacaagatagttatatcaaaataaatagcctaaatgatctctaagcaatttaatcagggcagtatcccacaggtgactctatcccaacccaaaagtaaatgagacaggtttcatgtctggatattacacactggcagctgaatcatgacacttttctcatttaatagtctgggattggtggggagcaaagaccttggacagttaaatgtatgtgtacctagtcctgatgagacgtcacagttgtgacatctcacaagtgtgtgtgagagtgatgcagggatggagagatggaggaggaaagatggagaaggacagatggaggaggagagatggaagaggagagatgcaggaggagagatggaggagagagagggtggaggaagaggggaagggaggggaggggaggggaggataatgtgggaatgggaagggagggaaagagagtagaggggaagaaagatgttcaatggaggtaaggagaaaacagagctaattacaagcatagagaacttacgtatttttgagttgtgtttacttgaatttctttaagcacagaagatcattcccagaaattaaactgaaactgatgaacaaagaaacagtacaggtggtagagaactactgaaacacacaatttcagttttgttctgttctttcaggatatatagaaagctggggtggggagatggataaaaaagcttaaaacaagacaaaggtaaacaggcatagacgttttcctttccgttcctggcttcagccttctgcccatctttcctgtgagttgtcttctgtcatgcacactccaacatttgtgcaacacatatctctacaatgaagaatatgtcatgctagcttttctgtccaatagacgctgaagttatgtattgtctttttccagtgatcaaaacaaaaactgagacttgggaagaaataaactcgaggggacctgaatgagaacttgagttacactctaatacatttccagggcttttgagaagccagaggcatgtcctgtttcctcaaacaccataaaatgctccttagaatttgaccctatgacagaaactgctacttacctacacaatgtctactctcagaaatcttcattcattatagaacccaaatatagtctccagaagtaacacccagtttaaaaatggaacaggcttttatgtggagttaaccagtgaaatgctaacaatatctcattggttgtattggttgtacaggaattatgagagcgcttttagatgggactgcagtggcagacatacaccactgacatttatgcctcttctgtacactttctccatgccaaggatgcaccagtgatgactggagttgcagcagccttcttgggaccatgagtgaaaggcaaagagaatttcaggtgccttgttcatgaccaacttaagtggctggacccatggcagcagaacacaccaacttttagactgcacttttcatgacagcccagtaagcctatgagttttaaagccaatgtcggattatcggtaccagcagctgaacaaaatttttcatgtgccaacgtcttacgatgagactacaagctcttagaggaaaaagattctggcaaaatctaggattatctgtggaactggatggatattgaatgagtattttctaaaacgataaactcattaggaaacattctatctggtctattctcctcttctacgatcccgccccattcctagttatcattcatggcccagataaaatgacatctccaaaaagcttgatgttaagaccctgaggctaaattagacattctctcttcaatattcatgttttgtctcttttttcccctactatagaacttatcactgtatattataattacgcatttaaatgcatttttttcattgagtccataatctcaaatttatatatttttttcccacaccagaacatagcggaacaccatatcaggacctaataaacatttgttgtttaagttcttactatgcaccagacactaggttaagcccctgggatagagaaagaagaaaaggatgatgttatttaatcttggagaacatttgatctggtatacttcaaagcagtaaaatgagatgagaaagtatctgtcaagtaaaagactggagggaaggggccagatctacttaatagacacacaatcgtttgcaacatacattgattctgcaatataaaatttgccaactaagtaatgcttaactacacacatcaattttctggttgttcaattatatacttgaaaaaaaaaacagctgatgaaaattttgcctgtatttatgtgaaagacaaataatcaacaccattattatcctattgctaaggaggtaacaatacatttcctgctggtcttatctacaaagagacactacgttcgttatttccttccatctttttttttttttttttttttttttttgagatggagtcttgctctagtgcccaggctggagtgcagtggtgcgatctcggctcactgcaagctctgcctccagggttcatgccattctcccgcctcagcctcccaagtagctgggactactggtgcccaccaccacgcctggctaatttttttgtgtttttagtagagacagggtttcaccgtgttagccagggtggtctccatctcctgacctggtgatccacccgccttggcctcccaaagtgatgggactgcaggtgtgagccaccacgccaagcctttccttttatctttagctttccctctcttcaccaaataaaatcagcgaacacctgtgccagttacttccctaaaaacacagaatcaggaattcgattattgataacattcgttctatggagagtctgcttgtatagggaagtacagtaatgggctgcatgacgatgtctcagtcaacaacgaatgccacattcagcagtccccttagattatagtggagctgaacaatgatcactaagcgacattgcagctgtcataatgttgtagtgcaattacttttttatacaaataaatttcacgtagcctaaacgtatgctgtttatgaagactacagtagtgtacagtcatgtcctaagccttcacattcactcaccactcacttgctgactcaccctggacaacttccaggcctgcaagatttatctgtggtaactgccgtagacaggtgtaccattcttacgtttcactccatatttttaccgtaccttttccatgtgtaggtatggttatgtatcttcagatctgcaaagtcttaccattgtgttacagttgcctacagtctgcaggaccctaacaaggtgacaggctgcaccccagagcctaggtgtgccacaggctgtaccatctaggtggtcatatgcacattctgtgttgttcacacaaacaaagatgaaatttcccgatgaggcatttctcagaatacattcccatcactaatcaacacatgactggagtggactccataaccatcgactttaacagagcactaaatccagaagatcactcagagttattttcatccaatcccctcgtaccatagaggagttgatcaagcaattctcagccttttttattattttgctcaaatggtttaacccctcggtctctctacttcttcctttgagagtatcagtttttagcattaaaagagatgatacatagagctttatcccatgctggaaagagcatgatgggtgccaactaatttttataagcagcgcatgcagtccctatggatttgactaaaattttatccagtgaatattttctttatcatactcttcatttatcaaagacctcctatattggtgaactccaggaggggagctgttaatatctgcagtcattgttcttgagcccagagcccagagaaaggtgactgagcaaaaaaattaaagaggacgcaatatgcaaacagtaaaaattgctgttttctcacttactttgaaataatataaaaatgattctataaagacttgttcattatagatctcatttgaaatgtgcaatagcagtggattaaccggttaaaagtcgcaatcacttttgtttttatcttctagatagaattttttctaagacacagaaatctttgcataaagttgattatacttgatttttatcagcaacaacctcgcactgcatcatttattttggactttgctaatatgtattacgtgaagagttaaggtagttgaattatcttaggcactgtgagttatttctacaaaatctaagcatagacttaaacaaaagttctaaaattaatatatgtttaaagaaaaccccagctccattccatggcctcctctggggcactggctggccttggccttgcctatcttttaagtttacttcacagactttcctttctaacctccctgctaatggtaaacccatgagggcagaggtagcctttgttgtgttcttgactttctccccacagcctaacgtggtgtccaataaagctttggtgaaaatacgactacgtgcagggtagagagggttatctcataaatacagcatggaaagaacaccactttttagatgcaacgattgcatatttcctgtaagttgtaggcaaacgtaggtgaatcccagactactttgctcccctgcaaaatgctttctgagcagtactaatcactatgtagcctgccagagctttttatgccaatttccacttcatttgtttgtgatttgtccttactcaaagtaagtgcatttgtgctcaaaccaaccttctctctctgctttgagtcccttaacagaggtttcacgatgcttatgatgcagagtgaaatgtacaacaattttgcagaaagaccagctctgaatttctagctcctacttttggcctcaaatgaatacattgctctgattactacacccctctgaatttctcttttctcctctgaaaatagcacagaattgtgaagattaaaagaggtgatatagagacatgaattaaccgagtactggtaaagggaggttctcagtgagtgtataaagaaataaacagttataaacatggcaatcaaatgacatcaccatttacttttatctttaaaaccccatgggaaggggtttaccctcactttagagaaaaccaccttgagaatcagtgagacccatgaaagggggcgccccaagtcacagatggctaatgtgactgcaggaagaatcccagcagatgggccgggcgtggtgtgggggaaggaaggcgccaggcacagttacgggcagtgaggtacagggcagtgccctgctctcaagcagcttgcaacagggccaagcagtcagggcctggcataaagtcgagttatgagcaaagaacagctatccctccaagagtcaccatcgcataaagggggagaatcgctactggacgatgtggttcagaatgagtttgcagaatttattttccttccgctttccctccgtgggctgctgacctctaatcacaggctggaggtattcaatctggaagaagtatgtaacttccaaatgatgcaagctactgggatcaagccatctaggaaaagtgcctgtgtcatcattttaaaattgacagtctcttcttagaactttttaataccacactcgccatactctatatgagtcatactcaccacatttgttacctagggcaaattactaaaagtttgaccttgagttataaattatggtactacatttttaagcatgagagttttattgaaagagactaatactattctgccatgtattttaattttattataccagtctttctgtaccctttctgttatggcttattattttacaatacagttttaaatgataactatttttaaccatccattcaagggttgaataattttctcctttagaaaattatatattaccatttttcttcatctcatgtataatcatggatttgcacttttctctctctttaggcttattaagaattccttccttaatagttttaagaatgcatatatttctattaattttcatatttcctagccctttttcaatacagttttgaataaagtcctttcaattacatttttaaaataagaaatagagatttataaaattctctccctgcgggataggaaaatttggtgaaaagtttgtcctactgtttcaggaaatacatcacattggttacagcataggtctcagggtgcagcagtcttaggtatggattctaacgtcagtgtcactgggtaccaaatacctctctgcttccgctttcccgtttgttaggccaaggataaaacagcatccgcctcgtaggaatgccactagcatttaatgtgcatgaggttgcatgcatagggaatacagaaagtaagcagtcattattcagctacagcgtactgattattctgttgcctctgttgtgaccaggctaacaacaacaaccaccactttaaaaataatagcctttttcaaaatcattagaatctttgtctgctcaagctgccataaaagaatatcatagaataagtggattaaacaacagacatttatttctcacagctgtggaagggggaagcaatcctcccacctcagcctccctagtaactgggactacaggcccgtgctaccattcccggctatttttttctatttttagtagagatgaggtctcaccatgttgttcaggctggtctcaaactcctggcctcaagcaatcttcctggcttggccttccaaagttctgagattaaaggcatgagccagcacaccctaccccttcctatcttaaaggcctgtcgctgtgagctattatggtaaggagaaagggagaaagagagtgagggaggagagggagaaagagagggagggaggggagggagaaagagaaggagggaaggagggagggaaggagggaggggaggatggaaggagggagggaaggaggggaggatggaaggagggagggaggggaggatggaaggagggagagagggaggggaggatggaaggacggagggagggagggacggaggggaggatggaagaatgaagggagggagggagggaagagtggaacaatggagggagggagggagggaagaatggaaggaaggagggatggagggaacccttgttctcataggggcactcattctaacatgagggccccacctaccctcagaacttcatctaaaagtaatcaccttccagaggacttacctccaaataccatcacactgggatgaggggtggaacacagcaatgtatgaggacacagacatttagtccttaacatttagaatgtgtaaccagctgaatatttagaggcaactctaagggcacagcagcagaaagatcaggagccccactcctcatggacaacggctgcaaaagtctcatctctacctggccgtgccatgtgttttaaactttgctttgttctaagactatgttatagacaaacttatttcatcgacttaatacactaaggtgtataaatgtctaactaagactttaaaagatttcctgcagaagagacgtttgttggaaatgttgaactttaaaggaaaaattgtgcaaagaccctgctttgagtttgaacgctgatgattttgatgtagcatttacctctgaaaggtcgtactttaaatatcagagctaattaggcctacctccaaactatctcacacacgaagctaagggccatgcactctagaagtcactttccagcccacaacggctttcaaatcgcagagagaatgcgggacacagacaatcttttcctaaacaagcaacccccctccctggctggcatttgaaatgaacagtgtcttaagactgttttcctccctcttcaggaaaatcacagcctgagaacaggaaagcgagcggatctcaagaaaggagaggacaggaggagctcccaaactagcttcattcatttcataattataccaggacccatcccagcgctatgaaaatgccttaagctttaggcttaaaaattaaattttcatacataaagtttatggcccatccttcaacaaagttcgagtttttaaaaaatgtctttttttttttgatttacaaagtaatactctgttaccgatcaacgattgttttaaaaataaacttcaaaactttacaaatatagtcggagtccttacccaaaacaatgccattcttcccctactggcagtactgggtcctgaaatttctattcatcatgtacacatttcaataattttgccacaaatatatacacatacacatgtatttcataaaccctaagaagaagagattaaaaatttaaaatattcatgtaaataatataaagctattatttggcacattactcataatattgttttggaattcatccaccttaaaatattgcagcttaagttaatttattttttgctaccgcatagtctcttctgttgtataatactacaaaattatatccattttgctaacaaatgtaattgtttctagtttttcactattgataacagacctataaagcacatcagttaacatgtcttcttgtgcacacttttttttttttaacacatacttgaaagggaagtgttgtcttagagatcacaaacatccattttactagaaattgctagactcttcaacaaattgctaagtcaatgcacctgatctacagtggctaagtcccatcaggtggcatccttgcaagtattgattattatcaggtgttgcctatctaattggggtgaacactacctctttgctatttcaacttgcattccgcttattactagtgaaattaatgtttgtatttgttcattgaacatcaatttcctcttttatgatgtgtctgtttttatttgcctgatttcccactgagttgctattgatttgtaggagttatttgtatacttcgggtttttgttaacactaaaaattatacttttattaatatactagtatgtactttactgagtgtgggttggggatgttagtgaacattgttcacctgaagtaaatacaaggcaaacaatgttaaagaacactagtcaaatggcaagcacatagccagaatacctggattttattgactcctggagaaaagtttgtaatattgtttctgaaaacacatatttgtggtttttagaattttgatattattcataagtccttgtaattgattttcatataatttcagtttttgcgagaggttaatccaaaattcccatgtcgttggtttattaatatcttcttataatattatcatacttggtttaaacaatttaggctaagttatataggacatacaacttgagcactgtcacctctcctggaaaattattatgtatattatgacactctttgtctccaataattgttttttgttagaaagacaaatcttaatctttgtcgtgtttgatattatgataggaacaccacggttattttagttagtatttacctggtgtatttttctactctacctttactctcattgacttgcctcttttgtaaacaacgtatcattcaattaaaatacaaagttcaacgtagacatcacttactatgctttaacggtgaatttaggattccggataccttgttttgtgctatatataatttttctatgtgtcatttacacatgtctgtgtttgttagactcttttttctcccttctactggcttgaaagttgtctattctgctaaataatcatgattaagttaaaagctactagagaaaggaggaccagccattcctgaatcttgtgtagtagactcaaaaagaacgcctgttttcttctctttcctttttgtttctaagtgaaataacccaggcatagaaagaaaaatactgtgtaatctcacttagatgtggaatctaagaacatcttctcagaaatagagattagaatcagaatggtagttgccaggggctggggagaggggaaatggggaataattgtcaaagtttacaaacttccagttcgaagatgcatcagccctgggatctaatgtacagcatggttactttagctagtaatactgttattatatacttgaaatttgctaaggtaagagtagatctttttatttattttattttacctatttatttattttatagagatgaggtcttgctatgttgcgcaggctagtgttgaactcctaggctcaggcaatcctgccacctcggcctcccaaaatgctgggactacaggcatgagtcacctcttctggctgagagcagatcttaaatgcccccatcacacacagaaaaatgttttctatgtgaagtgatgaatatgttaattagtttgataatggtaatcatttctcaatatatcacattatataccttatatgtataaagattttgttcattataccctaatgaaactagacaaaatgtgttaaaaagtagatgtggaacttaatccaaatataaataaatgcatgaatgatatggcaatgtaacaaaacagaaaaaaaattaaaacctgaagtctgtcatttcctgggaatgagtgaaattctgagactgcttaatctttagtactccttccttattattgtcccatattttagatttaccttgattttttttaacctctaaagttagtcactattactgttacttctctttcctatagagaattgttagagttctaattctgctatttgtagattctcattcagagtcatttgcttttgactctcttgggtgaatttcagcctgtggactcacacttgacttggatctgagagtgaaactccggggcatggtggaggatgccctccctctgttgagcttcttcctttcttgctgccaggcgtccacaggcactagccctgcctctttttttcatttctgcaatctgggattcccaggacacataagcaggctgaaaggaatcccaaaccagaataaaggcaggtttgtggttagaaatttaagaacatcctttcatgttccccgcgcagtgcaggcaaagacagatattatatttcccttgctatttccttttgctggtgggctgatttttaagtttgaactcagcctttatgaggatcatgcatttgaaatgctcgggacacacacggaggaaactcagctccaactccttatcttcaggaccctggagcttcaaacagccatcgccacccagttagcctggggctgaaagagtaaaacgtgcccaaccaggaccctcagcctccagcctcaagttatcactcaggtcccaaaatccacttcccttttggccctgaggtttttctttacttccttgcaaactcagctatggagaggaaggaagtatgttccaccagatacccagagacaatgagaattttctaagccttggctttaatcaaaactgtcttttaagccaataaaaacagcatttgcaactcaaaactgccatcacagaagtcatcatttaaattaatgatgaaccataagaacattagttcagccaaggaaactgagtctccaagtagaatcacattttatacgcctttagctcagtcactaattctgtcttggccaaatagtctaatgaatgttagaacagaattgtattctctatgagaacacttttaatgagatatattaattttcatttaaaagcagtattatttcttgtgggtgatatcacttattttttcaaaaatgtattacgtaaaagcaatgttctgactagctgtgtattctagtgccgtgtattctagtattcgagggctaaaggctaggctgttgggtaatgatctaaaaaaatctgtaagctgaaaggttagatttcttaaacaaaaatgtacggtacagatttactcctcccaccaaaaggggcctctgtgacttctttcccctggagttatggtgaacaaactgcaacagaataaaaataaaaaacctgctttgaccacatttctattacattcaggtaaacaaaaacatcgtatgggactgcttttagatttgtgacatagttgttccttccaaactagtccaaatcctgaagctctgtctgtggcagttaatttacttctctggcacttgatattagctactttgatgtctttcttggaaagtcataatcaacaatcatgagtcaattttcactgaccttcaacaatccaggaaattgtcaaataggaaaccatatcatcttagcaataactctatgaccaatataattttgaattatttatatcaccttaatttaaggaagcatcttactggcaacaataataaaatgctggatttttatgtatgtgttctagctgaaataataaaaatgaaaatctttactccaattgtgactggctcacctaaattatacatattttctaaaccaatttttgatagcactcaaaaacattaacttatttgtgttttgaccagaatgctcagaacaattatagacacaatagtcctgcagttttctaaatacagtgtttttctatctatataatgcaatttgtcatagcagaagaatcatagcctcaggagacaacatgtcttagaagtaaatcagatcgttcttattgactagctccatgaacttgggcaagtttgttaactacctgagcctcatctataaaatgaggatgataacatcaaactatcaagaataaatggagtgacatttgtaggtaaagaatacaacacctactactcagctcttgggcactatgcagaagctgttatgtggtgatgatgatgattaccaacgtgactacaattaattattagaatttcctcgtcttaggaataattttaagaatagactcaaacattgctatagtaacacattattgtacgtagaatttcaaaaagcatgacattcaattttcaggaaaaatactcattcagaataagagctcctgtctttccactttttagaagataatacaagaaacatccacagaggttgcacatgtatctaaggatctagtttaataaaacaaattactggtacacaaatttgcagatcacaattctctcatcgttctagtttacaagctaatgtgtaccccccctgaagctgagaagctccgttacttaaagccctgtttttaagggttagcaagcattttattatggaagactggttcctcggcgttctagggtagatagcagtaagggtttctcacctgctgtcccacccaggtacatgacagccatattcaccgaggtggtcatccccagaataaggggaacagggccttaaaacaaacactgattaactgcccaggggtagggaacatcctcagtaacatctagaacgttctttggccatttttgcgccataaacttggacaagttaattcttcttgttgtgcctcatcaataaactaaggataatttcaatcctagatgagtaaattaagtgccctaggtaggacgatgaacagagaaaacatgtaggaattgggtttaagtcccatttctaaacttctacttgaatcaaatatttcgaacaggataaaatatgcagctgaattagcaacaattaagaagcacttatcaatatgtcaagtatataaatttaagttaatgttgctgaggtcagatttgccttgatacaaaggctgctccttatatagaatcatcatattcagagctcttcaaattaagttgaaaaactgtcctctaacttaatttgacctcgactattattagtaaaaataaatagtggaacctgtttcaaaagtagcaaagtgtaacagtatttaaaaattatttagttacaaattgtattcatatattttatgctatattttatggaatagcaaacaaggataattactaaaaatagtgagattaaaaacatatacgttagggaaaaattctatcagcattttggtgaatgatctgtctctgcacagtatcatttgacatgttacaattagtaaacagttaatgcaccatattcagagttcttcaaagccagttgaaaaagtgtcctctaacttaatttgacctcgactgttattggtaaaaataaatattggaacctgtttcaaaaatagcaaaatttaatagtacaatttaaaaattatttatttacaaattctattcatatactcctatgttttatgctatattttatggaatacaaaacaaggataattattaaaaataatgagattaaaaacaaatatattagggaaaaattctgtcagcattttgataaatgatctggctctgaacagtattatttgacatgttacgattaggaaacagttaatgcaacataaaatgtttgaaaactttaaatagagcaagtcagtgctcaagtttccctaatgtgatgttgacttttataaactctcaccatttacctatcaacttggttaccctaaaagccagctatttctataggtccatggtgtccccacagataaagattcccacacaaatccaaaataaaatgtgaagaaatagatttccccccattgcccaggagacggggaaccatggcccccactgtattccatgcctactttgtgtgcgtttgggctgtgtaagtcatcccaaaccggcccaccgcactcaggctcgcccggcatattagctgatactgatcacctgcccaccgcacatagactcaccaggcatattagctgatattgatcatttggaactgacttaaaaccacctttttacttcagctactcatctaccaccaaaaacccagtgttattcaccaagttggaggttttttacgttattttttctaagtggaatggtaacacatttccatacaactcatttaaaaatttaataccaaagaaaattttataaatttttgttttctatgtaagagaaactgtccaggtcttagaaacagttgattttggagaaaaacaaacacaactttttaatattttcaagaatatatttgaaaatattaatatagttcattttatgtgtaataatgtgatttcattataatatgttaggttatattgatgattggttagatagaagccaaggataaaatttataactctgtcaaagtattcactaaattttaaaaagtagaacaatttcatactcatgcctcatatccttccttcagaaaaacaattttaaacaagtacaccatacaggtatgtccccactaatggcgtaaagtgacctgtcctgcagttgaacatttttatttgtcatctatgaacattgatataacttgaaaaatacattatcaaagaattatacttagttttatacattatacaaaaattctaattttttgtctaataaaaatttgatgatctataaatcctcaaaatagtagcacagagaatctagatgaaaacttaaatagtggattgtgatgacttttcatttactgcaaaaataaaaatatgattcaatatttgaaaacatattaattcaacgtgttaagatggaagaagaaacaaactgattaataaaaaccaaatgacatttagtaaaatatctattattgaataaaattaacaattttggaacttaagaagataaaaatcacttttgtgatttttacaaaacaaaagcataaaacctagtaatgtaacagaaaccattcctgttaaagagacaagaatagagtgtctgtttacttcaatgttatttttttttgaaagtgctttctaatgcaattagttgggagaattaaataagtataattatttgaaacagtgaagataatattcattaattccaaaaaatgcacaacaaaagaatccattaacaacagttattaaagaaaagtgagttcaatgaagttgctacttagaaaatatatcatgttttaatatgtattagctataaccatttagaaaatataatttaaaaattataaaatagcaattaggatgaaaaagtaacaataagagtttaaaagggagtcttaggattaactatgaactctgaaagatctatgtgaagaaaatgataagcttctacagcagagtaaaaatagtttaaataatatataatgaatataaatgaatattaatattaaagtcttcatatctaaacgcagtaagtattgatcccagctacactgcaactccaattgtaatagaaatagcaatggtcactgacacaataagtgacacattcttggttggtagaaaaaaatggacatttatattaaatattaataattaaatacatatctttgcatacttcgtgtttaggctttggcttcactccctccttagtgtcttacatgactttacatcctcaccaaagttctgaagatattccaaattgtaaggtgccactcttagcatcagaatgcatattttatattgaacaatggtatgaaaaggtacattgcaggtgtgcaaaatataaagtgtatataatttagcttgaattattgtcatagccatatacttgtgattaaattttttttaaacactgtaatgactgaaataaaataggactcacttattcatgcctcatatatattcaaactacatttttggatctattttctagagtcagtacaagtgagatggtggaggggagcagataggaataagacatatatacgaggtcattcttgaaaagtgtgttcacaatttcaaaatcctcgcaatccacaaattgaaacattgttacaaaaaacctaatccaagaatattgacactgttaaacatatgtccaaatccaaaatgtattttcacaacaacttaatttggactctgtatcaactcaccataaaggattatcatcctgtttaaagaaaataattgtaaggtgagcaaaagatggcattcaaatactaattgagtttctatatttgaacaaaatgatgactacagctacatataaaaccattatgacctgaatattaattagattctttttgactaatgttttcctcttggatcaatacacttagttaattctctcaagaggaagtaattattgtagcagtgaccaattgttgtttatagctcacagcaagtctgaggtactgaaaggtagtatcgctgcttacgtttctaagtattttgtagtatttagagaaacaagtagtagtcaaaatgattttttaaattttatttcacttacttgaaagattagagatgaatatcctcatttccaaagacttatttttgcaagagtagctatgggattacagtcaagttcacagaaaacctaaaaatctctgtaaattccaagtacatacaaaataaggaagatatatgtgtatctcaattttttttgaagtaacataaccaaatacccccacttaattctattaaattgctaaaaaaaaaacccacaaatatctgaataacatcgacatcacaaaggacattataaaatggttaatagcccccaagtaatcttaatatgggagagattttcataaaacaaatccctttccacatagaatgtttattcataatgcatcatatactcatcaagatgcttgctatttggagaattacaattactttctcattctgctgtatccttttattttttcaatatatgaaacattttcttaatttcctgattgcaaagtaaaatacacaatgaggtgcattttccaaggtatcatcttcgtctttttgttgtttttgtttttgagacggagtctcactttgtcgcccaggctggagtgcagtggtgtgatcttggctcactgaaatctctgtctcctgggtttaaaccatggtcctgcctcagccctcctagtagctgggactacagacccgagccaccacacccggctaatttttgtatatttagcagagatgaggtttcaccatgttgcccaggctggtcttgaacctccaactcttgatctcaggtgatccacccgcactggcctcccccaaagtgctgggattacaggtgtgagccactgtgcctggctccattttcatcttcattgtgctttgaaccacactcctaaggctgtgtagcttttgatattgagaattttctctctgaagtttaatcaagtatttttatcagagctcatgtattctttgacttttttgaatatgggaagcatgtttttatctaactaaaagccctcaatatatcgcattcatctggtagcttttttcctttttctccaatcttttgaaagcatccttcacatacagtttaacctcattttttatacgtatattgtaaatatcacacatgactttatcaggttgcctgatccaaaataaaattttttgtttctttgcagtttatcaattaaccagcatctgttgaattcttaatatttacattctacttaaaacactgcaaaattacatcttcataaaaaagcatgaaaattatatacaggtgatacccaatgaagtctcagaattacaagtagtgccaatctatccttcccctacaaaatgtcttgaagttattgcatcattactggagtttatattacagaattccattacagatggaggaagaagggcgttcaagccaacagttgggggaaaccacgacctctctgaggcacagcaaaatgttgacctgagcttggggccatatataagatgagcttcaactctgcagtgtattgttgttttatgattaatgatgaaatattgaaaagcttctgaggagagaaacatgatcagatcaatatttcagcaatctctttctgagactttggttgtgatagggaggctggaatgtggacgagagacttgaaggaggcaagcggttagaaaggagttgacatagccgcgtgtttcctacggtgcaaatcacaccaggcatttctttctcatgtctcttacaaatagttctcatttttaattaattcactacagttaccttcttcccagtctttatactggttttatgctttattaacaaaccacgattcacactctgtttccacttcatctcctgttctccttcgtctccatccatgatctccctcggccacacttgccttggctcttctactttctgaaaccatctattttcaaagatcacagagaagccgcagagcttttcttctccccatgtggcatatctccaggcttttctgagtctcctctcttctgatatccagctgtgactagtacagcttgaaccccattatgtttgatgactacacattttatagcccgacttcctgttcaacctgattttgactctgatagaattaaacctgcccctcaaatgaagatcgcgtgtctgccaatgtagctcctttcttctactaaaaccgtctgatccttattttcatttgtaatgtgaaaatagaaatattgtgtttgaggacagtgctactcatcacctgcacggcaccccccagggggctgtggcttccttcctcctagaaagttccctgccgcccaccacactccgtgacttccccacttactcactgatgcttgaaatccccctctgaggacctcattccttcaacaaacaactcaaggtgctgatcgctgtgaaaaatgagacacccctagagagagagggagcactttaaactgtcaccgcgttcactctttactgagattgcattttaaattgttatgagagcaggtcctagtgggaagagagttaaagaaagatttcctagaagagctggtgcagaaagttcagaatgttgaagctttcaaagtccactccttttattatttcctcattctgcctggagcttactctgaattattgtcactacagatatcatttgcattacatatgttttcatttatggatagatgtaaacatatatatacttgcaatgcgatatacacgaatcagggcgtagtggacactcaggaccatgaagctgtaggggttggtgccctaacagcaggcaaccatcaacccacagaggttggtgaaatcgttcattagtaagaaacactggcagtgcttggaaaatgtcaaaataaataaataaaagtttaaaaaatacgtagctttgcctgatgccctgtttgaaatgttgtaggagactctcctcattaactgaagaaaaactcactgcaatgcaatacatttttcatagagaaaaaactgcatcaaaatcaggagatctaaaatgaacaccaccaacaaaataccaccattacaattacatttcaaaagagagaaaaaaaaaaggcaaagaaaatctcaggtgcctgagaattagctcttttgcagcagctttaaagaaaggaaaagaaaagaaatggtaaaatacatccactttaaggtatacatcactatatgtatattaatcctaactcactactaaatcccaggcctgtatatgattaatatacttatacatataaaacaaaaatggatgcagcttccacattatgaattactcctccagctgcaagcttacatgtgattacttggtcctggcagcgctatttgaaaggcacagtgcattccacgatgcatacagtcctcccttggtgtccacaggggattggttcgaggatccccatacatagcaaaatacctgccctacagatctcatgtatgggcaaagtcagccctccctatatagatggatttcacatccccgtgaatactctattttccatccatgtttggttgaaaaaaattgcatgtaagtagacctgtgtagttcaaacctgcactgttcaactatcaactgtacacccacacctgtcaggggtgtgtgtgtgtggctggacacatggagtcttactagattaatctcagcatgctggtacagctagttttcctgtatgaccttaataggtatagtactttatggcttagtactatagtactttatgcccttaataggttcttcgaatctgggactttaagaaaacttataaatagaaaaacatttttttccttgccaatgtcataacaaaactacattgaacaaaagcatgttattccactaattgctgtacatcctttcacctgaagtctcagtttccaagacctatagacaatgaggattacatatatcatactacataggaaaaactatctaaaaccaggattctatgagtatataggcacagataactatacacgatcacagtatttcaaaaaatacatagaaaccacatgcataacaagtgatttgcttcaaacttgtaataccagttatttacttgcagtataccttttttgaaggcagggcttttatgtgcctgtttttgttgaattaggtgagaaataattgcattcttcctaacactccaaaccgactgtagatgaacataaaatatatttggaagactgtacattttcattctgtaattcttgactgtacatttttcattctgtaattcttgaatgaactctcagtaaaggaggttagtatgagatgacctttactctaactcaccactatatacctttgcttgtatcagtcttgatgaataagtctcgacacacagataaaacgatagataaaatttgttaagttgtagctttagcttctcatagaaatcaaataagaagtattttgtaagaaaggaaattagttcacaatatttttaattacaaaggaaggaaaaccacatgcttaaaacagctattgcgtcatgtacctgacatttctaactattatcatttaaaaatggggatcattatgttgccatcatttgatttttgaggaagaagtataaaaaatataaacaaatgaaagccaaagagccaaatgatagagggaaaattaccatttactcttacctttatcttttaaaagagatttggataactcatttgtaagaagaatatacacttgaatgacagtctttctcataaaatataacttataaaaaggcaatgagcatatttgtattagttcacaaatgaatgtgagtatatgtatataatttttccagttttatgtcaaaagtcatgaaagtgctattccattcatatttacgggtaattcgagaaatggatgggtttctggatttcatatcagataaccggtgcaaccctgctcaggtcaattatacttttttatcttcaactctggggtttcagaagcaaattataataaatgcctaataaacttattttgagagttaagtagcaaataagaatagaggacattctattaacttcaattttcagttaagcaatgaatatattttaatataaatatttatcatttgtcgttcatttgaaattcaaattaaatgaggttttctgtattttatctagaaactctaatagagagcagtaatctgtagcaaatagtttataacctggatatggtattcgaatattcagttaaaaggatttgtagctagaccatctgggtcaaaacactgacagctcagcaagatgatttagcctctgtaagcttctgtctgcgtgtatgtctggtgaaacctgtactggtcacttctccaaatggttgtgaaggtgaaatgatataacatacttgctgtgcttaacatggtgttaagtgttcagtaagtgttgactctcaccattatcactggattacttttctatggaggctgttgaagtgtcctgggagtattcagaacgacatttgtattgctatcagtgataaccgcatgcattttttcagcatattctatgtcacttaaaataaatgcagagttgaagtaagaaactgtgactttattgtaatatataactcatttactatatggaacatattaaataacccctcctccattatcttagaagtgactctaatactcactaatgtatttttttgcaaagttaaattagacatcaaagcagaaccagagaagaaaatagtttataaagtccaggcctctgaaataatcagcattttattaacactatacttcttctagctgctactatcaggcttataacgtgaagtatcacccaactggcatacgtggggaggaaaaacacatgactttttttacgtttcacttttctaaactatgagcacaaaattaagattttaaacactatcaacgtgctcaaaatgtctctggtgcccaagagttgcaaacgcattattgattaatcgtcagcacagtcgtaatggcattaattgaaacatccaagcaaataactgtttctttaatatttgtttagtccacaaattatagtaagaggtctgtgtttatagggaaggccttctgttctttaaattatatctattctattaatagattaatctatgaaatttctattaaatatcgaacaaaaatctataggtctccattaaatttacttaaaataaaattaaatgtttcttagaagtgcatcaggtgcaaagtcaacataatacatagcatttcttgtgtctaaactgccttgtgatcaggagatacgggattattagaattttttatcacttggaaaaatattgccaccctcaacaaaatttatgactgctttgctttgaaaactattgtactgcttttattttttcccagactcaagtacccaaaaggtttgctcacagatattccagaaggaaatgttgtgtcttggccacattcatattttcttgagagccatcaacaaacatgcttgtagctgagcagagtgtgtggtatagaatgacaggtataaatagttaatacatttttccattggtatcccttaaactacttgctccaagaaattcttctaacaatgagattagtgatataagaaaaacaaatgaaagcccttggccttataaagataaccaatgatagtcaataaaagagtagcttttacggcatagttacattttctggggttttttctttctagtttttaagataaattattgtctagtttgtttttattgatttttttacaaataaatatgggcgaaatgaaagcaatatgacttctcttttatgttttattaagaacagaaactgtaaggtcagaaggtataaagcttctgtgttgtgtatttgttggaagaaactcagtgccaagattaaaggaatcatctttaatgttttaaaggaaaggacaaaggagaataaatacattgatttgtgtgcatgatactatggcctttatttaaaattttacgtgtagatcacagatctcgtagagggagtgataggaaaacaaacaactgtgctgcttttgtaactgttacacattggtgaacttccaaaacttctgagtgttcctaaaattggcatagataaaaggtaatattgtaatttttaacctcagcatacaaaaattcatgtgcacatcttcctaaaaatgcaaataatgcaaaaattgtatacgttttgcaaagcttgttttagtgataatactcagtgtgattccattcacaatgagtataactttacacacacctgtgcaaaacactttagtcacagaataaaaactctaaaatgctataactttggcatgactaatgatctatactaatgaaagtgatattgttatattttatatgttattccacaaggcatgaattataattggatgaacaataaattaacttgcacaaaaacaggattgtttaaatgatactttgtgtaaaaaggaaaccatgaatagttaaaaagtcaggaaacagcagatgctggagagactgtggagaaataggaatgcttttacaatgttggtgggagtgtaaattagttcaaccgttgtggaagacagtgtgacgattccttaaggatctagaacttgaaataccatttgacccagcaatcccattagtgggtatatacccaaagggttataaatcattatgctataaagacacatgcacacatatgcttattgcagcactgttcacaatagcaaagacctggaactaacgcaaatgcccatcaacgatagactgaattttaaaaaaaatgtggcacatatacaccacggaatactatgcagccataaaaaaggatcagttaatgtcctttgcagggacatggatgaaactagaaaccgtcattgtcagcaaactatcacaagaacagaaaactaaacaccacatgttttcactcataagtgggagttgaacaatgaggactcatggacgcttggaggggaacatcacacaccagggcctgtcaggagaaatacctaatacagatgacgggttagtgggtgcagcaaaccaccatggcacatgtttaactacgtaacaaacctgcacgttctgcacatgtaccccagaactttaagtataataaaaataaatttaataaaaaaagtgatacacataattttaagtgaagtagtgattcaaagtcttattttccttctggtcattgattcaggaaacgaagtctttagttccagtgggatcccaattttaataaataaaaggaaatgtatatgtgttttgatgtttctgtgtagaaggaaaaccctcaggggaaagaaaaatagaacagtggttttccctgagaactaaatctcttttcagaaatacaataaatgttcaatttccttaatcagaaaataagttaaaaacatttaaatacatagttaaaatatgtaatagagtactggaattcatttcaaagtagcctgtgtatgttttcgtataccaacaaatgaaaacaaactacatattttaaaaagataaactccaggttaagtttaaattcagagaaaggtcaaaaaaattaccaggatgccatcagactatccattttacaatgttgtgtgttttataaaattgcatgtaacttttctgccaattaaaaatagttccttcataaacccttactatatagagccatagtttaatccaacactatacatacatatttatatgtcatctacagataacatatatatatatatatatacacacagacacatacatactgctgttaatctttaagaatttcttatgaagttgggttgtattctgaataaataagcttaaaaatccactgaagggaacgggactgacttcccttggatttctgacctttcactcctctttcgtgcctcatctctgaatctgaaggtgtctggcttgacccagcccccatttccccatcaactaatagctgtccgtcagctttcagtcaacctcctcaccacatacttaaatgtaccgtcttaaaaaagcatattctcattgtttcctggtgccatgtttttcttttatatctagagagttttcttgaaattatagacatggatagagctgcatgtctatactcatgaaaacagcaagttcactatgaggtgtctcatacttccctttctcacaaggatatgcagaaacaacctgtttgtatcatgtactgatttaaacacaagcgacagaatttaagaaactccttaaagtgttaacataattagaccttacccattccctaaatgtatttttatttttgttttttctgagacggagtctcactctgttgcccaggctggagtgcagtcgtataatctcggttcactgcaaggtctgcctccctggttcacaccattctcctgcctcagcctcccgagtagatgggactacaggcgcccaccaccatccccggctaatttttttgtatttttagtggagacaggatttcaccatgctggccaggctggtcttgaactcctaacctcgtgattcgccgccttgccctcccaaagtgctgggattacaagcatgagccacggcgcccaaccccctttccctaactttaaatacaataattaaaatgctacatttataaaatcctttatggttctctttctccttatgctcatataacttccaccaaagagaagaatctattcttgaatttcagactacattcacaatttatatataattccagtgctcaatagagccaagcttggtaagtgttcagtgaagtatagtgattaaaattcagtttaattttcaatggatggagtgtaaagttcaaggaggttaaaaacacagcggtagtgctggtaatctacaaaatggctaatatgtgacttaaaattcataaggaaactgaaactataaaattatcagctatacagaatatgaatacatattgagccacatgatacaattacatctgatgctgctatagctatataaaatataattttttaacatgaaagcagcattttaatattaggttgacacaaaagtaattgtgagttttaccattaaagtaaggtactaaaatactaaacatataacaaaacgttagataacatatgcctatttttagaaaatgattaaataaattcatgaatggaaactcaaattttagctacgaattcaacataaagtgtagctttttattaacataccgaacagtctatagccacttaaatggctaacaaaaccagcttgtaacttgctgccactatcatctctgtttgacttggtataagatctgaacaaagagccaagtgtgattatgtggaatgctttcatttgtgtttataaatttggctcttggagtatttataggaaaaacactttaaattacattctcaattgcagtatgtatgtaataaagggagactgctaggataacttctctgaaagtaacaagcctcatttaaaaatacttgcccttccctgtattaacattatgtccatatatgaaataagattgctatattgttataactatttactgacagttgttaaagttgagctatggacacattactttccataaacatcactctactgtttttatgtttgaacattttcctaatttttttttaaaaaacaccaaccgtattagcaaacttctgagcatctccgtttagacgtgcaaaggaaattattccccatgccaagcttcgtctgtctctgtaaacgcagtatacacactaacacacacacacaattaagcagtcgatggcacaagtgtgcaagccacattttgaaacacttatatttagtgtaaaaagccaactgcttcaaacaagtcatgaagaaacacacagtcacacacaagactagacagatacaggtggcaaacggacatctcaacagaatgtcaagtatcttcctggattctgaatcaccattaaatgtgaatttttggcagtattgtccttggataagattccaagtcccagtagcccatttaatagcgttttttcatgagcaggaatactgactttattactcaatgtcaatacagtgtggttagtgcaactttagcaatgtatcctctaatacactgattctgcagacacggttttattgccctaaacaaatagactcaatgaaaggataaatgcttaactttggatgtggtaactcattcgagtatcttaaccctgttcaacttataattagccaactttgaatgtgcattttcttctatttgtcattcattgcaattttcaatgcagcatttctaatgaagaaaaaaaataaaactctacgtaagatatggaggaggccaggagtgttggattatgtctttttgatgataaaaagactgagtgcttgcctgcagcagctcactgtcagtaaaaatgaatctgaagcagatgccaactgcgtcaaaagcttgtgttctatacattttttattaagcaaagatacaaatcacaagaaaagtacataggggcaagaacatcaaaggatactggtgtttcaaacagaaacacaggggcctatctgctgcttccttcccagcctagaacacagtgaactcatagctagaacgctgagcgttaactaacgcgttgaaaataaataactctgttttgtatgctctcttcattacaccgtacacttcaaatgtaaatattctgaattatttagaagtacgcttaaaagaagattttaccatggcctatttcttaagcaagcataggccaatcaaaggttactttctctctttaggcatatagttagctttgtatattgcagtatttgatattagcacgtttttataatgtagtatataataagctttgaaagagagtggatatgttaccacgttctgaaaaaataatttctaataaataataattgaatagacacgacatgttttcttcagttgtctagaatctgacaattaaattttagtaccgaaatgtgcgaccggataccaatctgagcacttgcatacatcactgtttcagtatatcctccacatttcacagaaaaattaaaatatacaagcaaattgtttacagtgcccacatttgcatatcaacactgttagaacttgagactgcagctatgctgggaaaaatgggtactgtttgaaggtaaacctatgttgataataactttgtaaataaattttaaggcttgtgtgaatcagctcacaaaatgctaaccttgtctagatgagcacagctctatagcaataccgtgtaagccataaatataattgtactttcctagtacccatatttttaaaaacatgttactatatataaaatattatttgaacgtatgttaaaattttcaaaaatgtataaattataagacttttatcttcatttcttctacttcctgtaaacatacagcattagaaatacttttttggtaattagttgtcatggaagttgcaattgcaaaagtagatatacatatccacgttttttccaaacacacttgaaagtttcccagtaatagaataaagtagtggtttttaaatgtattaaaattaagtgagttttaaaattctgttccttggtctctctggcttcatgtgttcaccttccaaggcagaggctgccccagaggtgtaccaggatggtatgaggcctctgctggcccctaggtggcactcagccctcgggagcacctgacccactgatggttttcaggtcaaatgtaaataaaatggacctggaaatataaaagtggaaaatactttgctaccttaagtatgatctcagggaattaaaataacctctcgacagcattatgggaaaatagaaggtagagatatgaaaacctgatagtaactgcgagaacaggtggtcccaggcccacagagtaagatgacggcataaggtctttgcataaaccagtggtttttcaccaaaaaacagctttaaattatcatgtctaaagctatgaaattaacacttcagaaggaaacaatttgagactggcacactccaaccttctgtttcaaatttctgaagttttactgaaatatcttatgcattgaagctcacattaaaggtcctttaaaatgttgtgacaaatgagactgttctttttctgttttttgaatctaagaagtatgtatagccaaaagttaaagcttttaacttttatgttgggctttcttacttgacatataattctatatagtaacatctgtatgtgataacatatacatacaagtcattttttgtataaacattaaacggaatcaatgtaatgtctctacttgttttcaaaatacataaaggaataaagtgataactgtattaaaacttaatcttattacattgtaaaacactgattttctagagctgcctcataaacacacctaacatgcattaaaaaaatgttttgcaaatgacaaggcaaaggcttataaaggttaagtgacgttttgatgacatagatgctggtgaatgtgcctgttagggcttgatcaggtttaccaattgcaaatgcattcaactatagcaaggtgaattcatgttctcttgagatgtgattagcctttgttataaacactttccctgggttgtagcacattgtagcatccaagggaaaacattcttttattaatccaagagtatttttaattatgtaaactttaaagttatacaatattgctcaaatacgatttcaaaataacttctgaagtcacgttttgatcaatagtgattttttgtgaaaataaacagaaacataaaatcttacaactgcatgcaaaggtgaatataatccatgtgaacctgtcattttacagatagaactgatgaagctcaggaacactggagcacgcccaagggtcaagatcataacacagatcttctggccactggacaagagggctctcttcttcattttctcggactcattagcacatcaacatcccaaggatgtcctcttctccaagcaaggtcctattgccagaggacggaatggtgccatttttgcttatttaatttagtatgacatcgttatctccctctaagctttgcgtttgtaaagcaactaatgtgtaatgtgtttttctatgcagcaccataaaattatcttaaatgaattgatcttagaagattacagtcagggagaaaggtagttagtatattgtatgcattcaccttttcagttttatttatttgaataccagttaggaactgagttggctgtgacagcatcctaacaactcatttataatcggaacaattttaattacttgtagcaatagtatgtttaaatggtagtattttgagagctttttatagtaattacacttcataatggagtcgggtatatatcagattcaacaagcatcattcagaatctgacaaacgttcattttctaaagatcataattatattttacattaatggttgaacttaccacagttcattgctgtataaacattttaatgtcaaatctgaccctacacttttcagtctcatatattcttactatttctactgcacattagtcattctgcctgcattgtatccctttgattatattttcatttaaaaaaaatgcctgatagttagaaacagactgtttttaaggtcaacatcctgttttttagcagactttagaaattactaccagtaatcatggataaaaacactcaattgttggttttgtgaaggtacgttgagagtcttttttacaacatttaaaaattatatatgaatatgatttttctaaatttaaagtatccactatccttttgcaaacagtttagatgaagacttttaatgcacattttccatctgtgacatttgattttgtttattgatttgtagcttcagttctccttcactgctgccctgtataaatgcgaacatctttgccatctgaaaagggtatgtgtgccatgaagtgaattaattctaagaacacattcttttcatctgggtacaggatttccaaatgcaaattatctcttgcatttttactcccactttgtaccaatatattttgcttttgtccaatcattttatagaactaaggacaatcattttatagaactcaagttatatatgtcgtatagttaaaagtcttcaacatgtaatttaggaaacccaggtccttggggacacgaaactttcccaagaaatgtgggtagagatggacaaaacccaacagacacacctcagttttccacattcacttaggtttttgagaagcacacactttttattctttttaactcctcaaggaatgcatgagtgttttatcatattaaaattctggacatgaaccaaaaggagaataaaaaaaaaaatccgctttacccacctataaaatcctactctgccccagaagcatggctaacagtttcatgtgctgacctccaggtctttctccatgtcttatacatacattttcatcctagaatgtttgcaaatctggacacaccattattaacaataagtttggccaggggtggtggctcacacttgtaatcgtagcactttgggaggccgaggaaggtgaatcacttgaggtcaggaattcgaaaccaggctggccatcattgtgaaacctggtctctactaaaaatacaaaaattagctaggcatggtggctcacacctgtaatcctagcattttgggaggccgagaagggtggatcacctgaggtcaggagttccagactaggctggccaacatggtgaaaccctatctctactaaaaatacaaaaattagctgggcgtggtggcacgtgcctgtaatgttagctgctcgcgaggctgagacacaagaattgcttgaacccaggaggcggaggttgccgtgagccgagatcctgccaatgcactccagcctgggggacaagagagaaactacaaccccccccacccaccctccccaaaaagagaaaggttgttcttcaggagagacaaacactgcgggagggtacctccactccgtgttccctccccgtcaccatgtggctttctgtttccacatgttgcttttgcgcaccatgccttcccatatggtataggttcttgcgcgacacacttgcatatgccagccccaacgtttattgggcagtctaagcaaaatatttacattctcgtcaggcaaagatggtaaaactcacagcaactgttctccaagggtggactcaggactcctggaggatccccacaacactcttgacagatataaaacactaaaatttggatttctacgactcccaggagggtaactccatgtgtcagatgatagccttcttctaaccacttgcctggctctttccaaaaaccacacatattttacaaacttcaatatatgtggccgtgttcaaaaacaaaacaaaacaaagaaacaaaaacaaaaaaaaactagtttaaaaaacacttttctgtctcctcctttcctgaattcagtttcaggatgcaccagttaattacctgtaagaccttgggcaaagtaacctcacctcacctcgcctcaccatgcctcggttcctttatttgtaaaatggggataataatggtgtccacaccataaaactgttgtaagcataacacaatagtcagaatgatgcctagtgtgtaggaaagttttgctattattatgaatgctaatgagaaaagtccttttaacttacagatattttggttgtccacaagttttactccatgaattttatgtttttgtatgtcaaggagtgtgttaaaattcaaactgcttgtatacaatccggtttcatcatacagcaggccgactgtagccttaaatgccatttcgttcttgcttaaataatcaaattactctctgaagccatgtgcagtcctttactttatatttcatttagaactcccatctgaaactgcagcctttctattctagagggaaatgaatttgtggccatgaatcttgaaccacatttctcataagaaacacctagacaagggtattagttcagaattatgaaataatacagaaaaaaagtgggcttttccaaatataaagaggatgaagacagatctcttgttttcggatatcagggctttctctccatggatgagggcaggtttcgctaatgctgattttggaccaggcagctgggaaatttgatttcctgagcattgccctaaatggaatagcacagatggttggtctttgcttttcttgaatggcagtggtgtaggaagaatggagctttccagaactagtaaaacagtcagggccacaggcttctcatcctgttaggaacttcagaggtcaaaatagctttgttaagacatgcaggctctgcttcttctccaggtgtccctctaatttcacagaagatcatgtgtccttggctattttaatcaggaacaaaatctacttgtggtctcttccagcctggaaagtaatccaactgaagtattttaaataccatctgcacaaaccttttaagtggctatgatatatccgcaatgctataattacacgtatgcagtgagtcacctttacctctgacagcaagcaggtttgtaaaaagctctctctgccttggcttagtggaatttgtagttacatccctaagtccgaaatacagctggagaaatacacattattctttatgtgaccgttcacgttaacgatatgcgcacataacgtttttacgttctttctggtaccataaacaaaagtcaagaggagctccagttttcttttctcccgactgcaaactctgtaattccttcttgccaagctccattgcgtctctccgccatgctctccatgtctcacttgcttctacttagtgctatctgtcctcaggggccgttgttcttgtcactttggaacattcttttatttttaaaaaacaacgtttttccttctatgttagttcaaaactacagtccttcaccaagggcttcagttaacatgagacagagaaaaatcatggagagtatgtttagtcggttgcaatatgaattacccattgtgcctcttcattttaataagacggttgtggcacaggaaggaagacactcttctgagataatatggtctcatcattaagaacatgggcatgatcacgaggacacccaaaaccagcacctgatagcctcatctattaggtttgggaacaccacttgacctcgaagaaaggtttatcctccaagaaaggggatagcaatcatactgattttgtagggccacagtggaaatcaaacaagagaatgtatgcagctcacacggtagactccccagcatctgatgcttgataaatattagttttctttcccatcgcctgtttggctgagaatgtttcctagaaaaccaaaagttgatctttcagttgctgttgctgtttgttattaggagatgtgcactaattacacttgaggccacttcattccattgtggccaaggagttgattcaaatgaatcagttttgttattggataggagtcaataacaattccatagaggcagctgaaggaggctgacatccacgccaagtaaagaaaaagggctaagtttcacttgaaaaataagaaacttcatttagagaatgattgtacactaaggcttagtaacttgagagaacaaaaaagagtttcaatctacttcacacaaaacaaacaagggttcttcaacacctagtctgttaatgtggaactatgtggacagattctgtgtaatttagaactaaacagtttaattttactcacatagctaattagatatcttgcctctatttcctggcaagttctaaaagattccccctcacattccttgaatataattagtatttttgtgtaactctttattttcagataaatcaagcacatctggagaagttactttaatgatactttttaagaaagcacacaatctagaggaacaatgtaatggaacaacatcccatgatttccaccagaaggtttctttctaactaccctttcttacgtccaatattgagtaatattagaaatgacaagcccaggaaacttactttacattctaagacttaatatttacaccacacatgttgcagcttcccattatcgttatagataacaaagacgggggactaatgtctgcaagcttttattaccttccagggaccaggttaagtactttacataaccttaattaaatgctggctgcagtctcgtcataggtggtattattattattattattattattattactactactttgtaagtgtatgaaagagagggttagcaagttacacaacatcacacaaatagccactgaaagtggacccggtcggttgagcgagttggactcatactatctctcctccaacctctctgtggcccactgaatgcatttagtgggagaagtgcctcccctgttcctaggtgaaaacaagggcagtctcaggacatcccaggttgctcttaagccatcacatatctatggtcatgtttagttgcaaaacttttctccagatagcaaatcccaagacaatatgataataaaattaaggtttgatttaaagttaaacttctgccttttttagctgcaaccatcaaaagacagaaagctaaaacaaggaggatataaaacttctttacttttactgagccttagttttacttattttgctagccatgctttctgttcctgcagcattaaagtttgactgagaaaagaaaacactagagagtagaacacttttcttttttactggtactgcagtggatggattcgtccactcagggcctggcagtgctgggtgccttcatgagtttctgacatgcccccactgggaacagtaagctccctttcctaaggtactatttttggggccaccctgaagggctcccttcacccttcaattttcttaagcaaaccttaatgattccagagaggctatcttacaagaatgacctacaaatatctcaggcttgttcacacaaactcaggaaattcaattcaatgctgtagccatttctcctgtactgctgacgatgaggctatgggtaatcccactctgcctttaggtttacccagtagtagcagataccacatcctgtccttatgacttgtccttctaagtgaatggatgcaagttcagctctacgcatgcagctggagttcctgccactgggttcaaggtgaaggatgttgccaccaactctgccgccctccccaataaaattccttttcaacatttgtaacctcgttgtagagtcttctagtggatttttaagcaaatctatgattccaagatctctcagatggtcaacctcccaactctaagatctgatacctgtcaggtctacgtagcagccaacattgagcaaaatcaagtcccattacgtcagtaaagcactaatataggataccagtatgctatgaattattttaagagtaaatattagttacttaacaactacttttaaagtcctcattccatatataacattaaattacactaatagtgtggcagctgtaaaaatggtgatacgtgcataaaaataatttaaaaacacagcaccatctttcaagctatctgttcaagcaatgactgtcataatgagcataaaaacagtgcacatatggatgaaaataaaattatatttggtgtaacagcaaaagaaaaattttacaaaatgaattaactagttacagttcttctaacacccgttctaagacagtgtatattatataacagtttatcggacaaatactctttaccagtttctagatacctgtcggtcatttctcatattgttattcaactgttttccctggaagcctctttaggctaatttgcctacataatttcacccattatatatgagattgctatcacgtaactcccatacatttaaaatacatttaacttttcttataggtaagatagattaacatcgatcaattagttaaagtagagggagccagggcctgtgtttctcctattttttgcacaaacactctaaatgactccatcaagtccagtagtagccagatttggaccacataaactgagttctgtccactgtcagtatgagcaagatgtaacactttcagatctgacacgtgtctcccactcagaattcatcacattttgtccaggtctggcagtgacgatggtgccgtggatgatggtggggatctgctggacggagtagagcagctgtccatggtcctgagtaacatgtgctcaagacatgagcaaaactttcagctttgctttcttcagctactgagattttgctactgggtaatgcattgtgaataaaacatctccaccgtactggaagcaccatagttaaaaggaggtatccacctttgtctgccatgtgttcacaaactaatctaatgtctggctcagagtagatattcaaagtgtatttgctacaaacaagaaatgaaaacaggaatgaatcaaatggtacctctgagtgcaagtgagtaattagaatcattattgacctcttcttgagaggagactcattatttcattcagcttgtatatttaaggaatgtgttatgtgctaagcactctgtgcactgcaactgttaaggtttaaccagaaccaacaactgcaaattcagcacggtcttttttatagtggcatacagatgtgcaacaaaaccaaacggaatcaaatacaaacaggcagggagtggtgaggaaatgcttcccaggtaaagcagagttgcgtggacttttgaaagaatcagtcaaaggaaacacacttgtatgtgtgtctgcaaaaacccatgtgtttaggcccgagggtgatgtttgttagaagaaaagcatggttttcacatatgtctacagatgtgaaatttcagatggtcgtgtttgaatttctacacagtaatgctctatgacatctgaatggagggagagaagcccaaagacgtaggaagtggtaaacacagatcagaaaggtctctaacatgagatttgaacttccatgctgttctatgggcaattttaaacaagggtcagggacactgcatctttcatagcatgagaaaaaaaggacagatgatgtttctctgagttatgggggaaaacaaagatgaagaagggccattcatagcttttctgtctcccatgcttcatacaatttaccaaggacaggtagatgctgtatttaggaaagattccttgtgagaagtatattcataattatgatccaggtttaagtagcagcttcaactacaaaataatgagcatatgacattgataatgttcattaactttatctccctatctgtagtttcatttaggatttctattctgtaagtctgattttttggtaagcttttactttcaagaaatcacaatttgtaattaaaataattcaaagcaaaatgaaaatatccatctgtttcttgtgactcatcatcctttacaatgtcagctctctgtaattccgccagttcacaacttcaactcaactgctttaattcatttctttctaaaatttagaggggcaaaatttcatctccctaaattgtatttgttaaatgtatatgtaatgatgtcaaaataagatcttctttgtaccctagtgtaaaatattatgggaataataatggaatttcctgttttattttgtgtaatacaaacacaacttctaaatgtttctatgacaggaatctgagtcttaatatggtttggggattatctatattctctttagtgttgcataattatacattattggtattttaattttaaaaacaaaaataatatgcttatgatatgtgcaaatattaagtaataaagaaaatattcaaaaggataaatatggattaaaagtcaagatatttaaaagctagggataatgatcataatactttcctttaaattgataaattacatataaaaacaaaatacaaatttatacttacaaccatgtaaagtaaatctccataattaaaatacaacctccaaagcatggtagaatttgaattaactaagagagaagtatttttcttttttatctactaattcccagtgattctgacatttcacttgttttcggaaagtacattttgatttacacataaaaaaattgcttagtgtagaaattttattaaagctgaagcgtaatatttaatttctgtggtcatttttcttgtgatatgtttctttcttaaattatagccgcaatatggagaacatttcctaccagaaagatacaaaattctttattcaacgggtggtaaaattcataaacccagtctaatcagttatatgcggagacaaaagttaaagaatattaggctaactagctacttttaagagctaatataagacaagtaatatctggttctgaaatgtcatgtaaaccatatggcctttgcaaaataattaactcatgtgaaattagaagtttcctttcaggtggacaatttgtttttcacatcaagcaggaacagaaccttctgccctatgtgaaaaagcaggcagggagcctggtgtccagaaggaatttctttcatcagagtttgagacgccagagtgagtttgttgcatagatccattattacctagttactttaataatggaggtttggacacttgatcattcaatgaaaacaccaaggagatataccagggaacaggaacaatgaagaccctggccataccaacaacaaagaaatatgaaaatgacccaggtgagcccggtcatagatttcagaagggatggacttatttatttgtatatgctgctttttcttactttccaaagaattttgttgtcgtcgttgttgttgttgtttagttttgttttgagacagagtctcgctctgtcgcccaggctggagtgcagtgtcgcgacctgggctcactgcaacctctgcctccggggttcacgcctttctcctgcctcagcctccagagtacctgggactacaggtgcccgccaccacgcccggctaattttttgtgtttttaatacagacggaatttcaccgtgttagtcagaatggtctcgatctgctgacctcgtaatctgcctgccttggcctccccgagtgctgggattacagcccaggcgtgagccaccgtgcccgcccgaattttttaactgaatggaatttataacaacccactataagattaatacatgtaaacatgttgatattttctgtgcctcagtcttgcatcatcaacatgtttctatacatgaaaatattcattagaaaaaatgattcagtttattttttctatgttatagtcttaatattaggcctctagtatcttcatcattgttcaaactgaatattaaacacaatcttcagtagtcccaaccatgtatcttattacataaaagatttacctaagagtcagggtccctaagaatagagatggaatatttaatgggttaatttaaaaggctttttgtaaagagataatttgttagttctgcaaattcatggatagtattaacagaaaccaacaagggacccacaaagcactccagaggcaaaagacgtgaacagtctcttttcttcaggtgcagaggggcaagggagggaaagtgtggttatggcttgagaaggggctattccaccagagctgcgtctggagtagaaccatgcactgcacatgcggaaacagcaggagggggctaccagcatcgccctctcagttttgtcccgcacctgccctttgtccagtatactctgaggactgaacctccctggcacagagagaggaagagagcccaatgatgccgtcctcaaggccagactccaagggcacagagtcgtggagagacacaacaaggaagcttgaagcagcaaatgaaaattggccagcacaatgagaaactgacgatgctgaaattacttgtgcaaatattaatatcttactagtaagtccaatctaaatttattgagcaactcttaagctcctgcattattaaccaaagctacggctaaaaagtgttttaaaaaaattaattacactaatatgtgaaaattattatttatatatctagctcagtatgcgtttctttttatacttactttaaaagaacactaaccatgaaatagacttgtcacccctgtgccttatcttccaaattaggcacaataaaagagctcatctcatcatgaactaagcaatactgcaatcgtgtattttgactgtaagacacagcagtctcttataaaccaccaataaataataacaatcatatctcattacttagaattgcattccatactttaaaaaagatgctttagacatattaaagcacagatatttttgtcttatatcagtttggtacaaataaaacaaggaacattgaagcaaaatgaacatgcatttctaagccattttaacattcagtgtccaaagctgttctactagtttttgactcagtggtgagaccagatttaaggtttgatagagggatgtcctattagtgtctactgtagagctttccacacttttaaacactttctacaagttctaaagctggtgctttttgaacttaccaaatagtgtgtataaaaagttttaggataagaatcaggacttctgttctttattgcgtggttctcaagtgactattgcaccgaaatactgcgaagttgaagttctatattcctgtcactggaaaaagtaatgtggcaatgacactgacgtctgattaaccccgaccagcagccactgtaagatgccatcagcagcaactacaccccaatttcagggacaccaaaatgcgggagaaactgaacatctctgaattgatagcatatagatcgtgtgacaaacaatcacctatgaataaaggcttcggtgcttcatatccttttaataaataatacgtgcactgacggttttcaaaataaacccaagattctagagacagtattccagagagtgcaagatgtcaccgttctttctgattgtacttgaatagctaatgtttatcagacacttcaattaacatcgcaggcaatgataatgatctaaatcactgatctctgttgtttcatttaacctcaggataatgccatgagttcctccactttgcagatgagcaaacacaaatcacttgtccatggtgccatgttagagaatgaagtgaaaccagaaaccaggtctaaggactacagaccctgaacattccagaacaacttgatagaaagttatattcatgtttcttggtattttacattttaaaaatattctaagatgaccatctattttagcttctcttctcatataatctatttttttcttactgtaattagatgactttctaaatttatttgtaataatcatgggtaaaataaaaacctggaaaaaagtgcttacttttcaacccatgtgtaattagtaactttcctaaaataattccagaaaactttgtctttgcccttttagtagctgtcaatgtgtatggaacgaaagcctcaggtaaccatgtggtcctattctctcttctttcaggtaaagtgccaaggatatttttcttatattttgccaagtcacctgatctgaacccaatctaaggtgttaagattatatatacatataatatatgtatatattatacacatataatcttaagattacacacatataatcttaagattacacacatataatcttaagattacacacatataatcttaagattatataatcttaagattacgcacatataatcttaagattatataatcttaagattatgcacatataatcttaagattttctatataatcttaagattatatgcacatataatcttaagattttctatataatcttaagattatatgcacatataatcttaagattatctatataatcttaagattatgcacatataatcttaagattatgcacatataaccttaagattatatatgtatcttattatacacatataatcttaagattatataatcttattatacacatataatcttaagatatatataatcttattatacacatataatcttattatacacatataatcttaagattaaatatatcttatacacatataatcttatatatattacatatattataaatatataatcttaagattatatgtcatctttttaagggcttattaagggcttaagattatatataatcctaagattatatatatataaacatatattcataatatataaaaatataatcttaagattacatatgttatattatacatgttatatatgttatatattgtgttaaaattatatatatctgtgtgtgtgtatatgtgtgtgtgtatatatatatatatatatatatatatatatatatatacacacacacatcttgagagaaaatttaaagttaattctcccttatgcaaatttcagatttcttcaaccattatcccaaacaagtacaatgctcttgtcttttctccattgcctgcttcactaattactcccatctcaggaacacagcatgtcccagactcactctgtagaacattttcctgaaaaaaacaaacaaaaacaaaaacctaaagactttatctccaacaacatcttaaaaatgaaactgtctaattgcaaaaaagactgaaggagcccttaaaatgatgtgctctctgttgtttttctctttgcaaggagagaaatcttaatcaaaaccacaataagaagcgaaaatggaaggtgtggtcaaactatgctcagggtctccctcctggcaccttagtcctcaactcatctccagctgggtccagcttaaaaccttgatcagtgattagagctggaggagtttatagcaccagaattcagaagtgcccaaggcaggaagaattatttcgtccctgtggttataaattctatagttcagggattatgcactataaactcatgtatatttcaggaccacatccattatttctaaacataataatgatttaaaataaagggttatcacaagagtgtgagatagcatggcatttggactcatggccagaggtaaaatatttaaatattttaaataattaatatcttttcccaaagagagggtttatctatttctgatgttaagcattattcactactcataattcagaggatggatgtatttctacatgcaaaaggcaggtacatttacttcatattttataatagtttgttatttagttaatattcactattaactcgtatgtggaggtccctaggcttgggtccctgaaaacacgaaaataagggtttttttttttttttttttctccagggcttacactctattgggtatatttctactgtataatgatttctaaataatagctttatgctggtgaaaatgaatagaaaatgtgattattgtattcatctgaagatatctgtggagggcctgctatctcccagacttgtcttagactcccaatttttttaaaaatgctcatctcatggagattatattcctgtgcatgagtgatggacaatggtacacaaatgtgaaaatataaaaacctgtaagtcagatgacaatagtgcaaagaagtacaaagacaggaataggaagtgctgggaaagagtaatgctacatttttacgccaataaaaatggtcggatgggttagataggttgaagagcttggggagactctagagcatcgtaggtgtaatacgttttaatcttaattggcataaaaatataaaacacataaaatagtcatgaatatacttttacaatctagaaatgtatttttttaaatccctggagaaactggggaccaaacatttagaaataattaaatatagagcttgaaatttaccaaggctatatgaagaaacagccttgtatcttacataagatactgagagaaaacctgtttaatccaaatctaaaaaaacaaaacaaaacaaaagataaaagatgcagacgttcagcgtactgtaattcatttttattgactaagaagtgaatgttaaacggtattaaggaaaaacagacatcagttgctgggcgtccgcaagctaatactttattcagttaaccaaagttacattcaggccatttttgcttctatagctgttaaacccctcacatatgatcaatttataatgctaaatgttgttattttaattttagatgtttaaaattcctgtaaggctaagatagcctgaaattgaacttgacctttcaaaagttcacactagggtttggattttgactactttctgctactgttttagcattaacccggagccatcggtgatcgcctctgtgttggaagatcattcaatggcaccactaacgattaagaaccaacatcctgtgagaggtgatacatttcaaaaggattttcagtgaattatataattaaatttgatttctgaatatgccattatataaacattgctggtggtcctgcactttaaaacaagaaaatttatcgaatgttttaaaagtatataatcagaaaggtttttattagcaaaggaaaataaaaggctaggtgacggattacctgaagagtgaatatggtgaagaggtgctaaaatgtagcaaacgcttgtttcccttcaataaattgattttatattgaactcaagcatcactaccagtacatgctagcgtctctctggtgaaaacccagggtataaaggacctggagaacatcccagggcactggggacatattcaaaaatggtatagaagaaaagtttagaaaaacataattttgaggaatctgccttagttaaatgaagtttccaaaataatgccaatctttgcttcctgtttctgcaattaaaactaaaaacacatacattaaaaggtaagaagttacaataataatgtttgattcctttactgttattctcagttgtcctttcattcaaaaacgctccatgacatcagtttactgtaatagtttttatttactgtatttgctttgaatccaagaataccatactagacactagactgttatacaaagttgtgaataattccctatacaggaaattacttagtgagtacaatgtatattatttgagtaatggataccttaaaagccctgacttgacctatatacaatgtacacatgtagcaaaattgtacttgtacccaatgaatttatgtaaatttacaaatattgatacacatatttaatgttaaccatatgcaaacgttatagaacatcacaatttagttttaatacagttctaagaagttatttcattttcatttacatcttcaggctactctgatactaaatcaagtattttcttccaactagatgttaagaaattaatgttaaagtgatatttgtgcttttgaataaatttattttgaagaatgtgtttgtaaaatacatgtaccctagaacttaaagtataataaaaaattatttctggaaatactggtataattctttaattagacttaaatgagtaaattttacatcatatatatgtatatatacacacataaatacataaacacacaatacatatatatgtcatatataatagaacaatgaaagtgttgctttgcagatctactgatgttaaatttgccatttaaaaagcagaataaaagaactgtaggaaataaatattctcctgttaatcctatttcttacttatgataatataaggagggaagaaggtgatagaatacagaaaacattaaaagatcttgccaaaacagatcgtgcttttcttcaaaaaagaaacgttgtaagaaatttataggagaaaatatacttttgccaggtaatgtaagtcatcagaataaaataagacactgtaaatatttaaatttaaaaccgtcggataagataaagtttttcttcacccccatcacccccagagaacgcactttttaaataattacttccaagagggggtttttacttgacatattgtaagtgtctgaagtgattgtagataaccagtcgtctcaacatgagagaggtgattttcaggattcctacagtctttcaaaaagccactagtaattggttctttaattcaacagatacttactcaatagccatcatgtggtagacaccttgtaagtgctgagtatattgcaaagaaaaatcagtttctagcttctcataaaatttaaagtctacattcagaaatatgccccatattggccaatatttttgtatcatatcatatatcatacactatctttcttttctttctttgagatggagtctcattctgtcgccaggctggatgcagtggcgatcttggctcactgcaacccctgactccccatttcaagcgattgtcatgcctcagcctcccgagtagctgagattacaggtacgtgccaccacgcccgcctaatttttgtatttttagtacagatgggttttcaccttcttggccaggatggtctcgatctcctgacttcatgatctgcccacctcagcctcccaaactgctaggattacaggtataagccactgcgcccggcccagacactatttttcaagttataaatactatttgttgataatagctattagaatttctgtcctttgtagaaagcataaatctacaagtttgtataaagaggccacaaagagtgagaggaagaacttctcatacatgtcagaacatctggatttaggatttgatttgcccatttgctaattaggtaacatcagctgagtgcttttgactgcatagttatctttcataaaaacaacaacaaaacagacaatttcctttttgcctatctcacagaaggtgtgtaatgttcagttttgataatgtataaagtcgtttgtaaacacagagctttctgcatctaacatattttcctacacttgggcacagatggggaaatatgaggggacctcaaaaagtttgtggaaaaataatattaaaaggtaaaaataaaatatataaactttatttctcaatatatgctccatcaacctcaagacacttttgtaagcgatgatgccaggcattcagtccatccctaaagaactgagtgtccttggaatttaactacataaatacagtcttcttaacgttattaactgaaggaaatgtcctttacagacttttttttacattttattattattatgctttaagttttagggtacatgtgcacaacgtgcgggtttgtttcatatgtatacatgtgccatgctggtgtgctgcacccattaactcgtcatttagcattaggtatatctcctaatgctatctctccacactctcccaaccccacaacagtccccggagtgtgatgttccccttcctgcgtccacgtgttctggttgttcaattcctccctatgggtgagaacatgcagtgtttggttttttgtcctggcaatagtttgctgagaatgatggtttccagtttcatccatgtccctacaaaggacatgaactcatcattttttatggctacatagtattccatggtgtatatgtgccacattttcttaatccagactatcgttgttggacatttaggttggttccaagtctttactattgtaaatagtgcactataaacataagtgtgcatgtgtctttatagcagcatgataagattaggaaacaaaaagaagtcagaaggagccaaatcaggactgtaaagtggatgcctaatgagttcccattgaaactcttgcaaaattgcccgtgtttgaggagaggaatgagcaggagcattgttgtgatggaaaagaacgctctggggcagctctcctgggtagtggtctgctaaacttttggctagtttgtcaaaacaatctcataataagccaacatcatcattctttggccctccacaaagtcaacaagcaaaatgccttgagcatcccaaaataccagtgccatgacctttatactcaactgttatgcttttgctttgactgtaccacttccagcccttggtagccaatgctttgattctgttgtgtctccaggatggtactgggaaagatatgttttatctcctgtaacaactcttcagagaccagagtggtccaggatcttgatgccacttgcataagatctctattgaaagctctactcttgtttgaagctgatctgggtgcaatgttttggaattcaccaagtggaaagtctgctcaattattatttttttgtcaagattgtataagctgaaccagtcatcatgtctgtggcactggctgttttctgctgttaactttcaggcctcttcaattagggcatggaccagattattatttttcttgcaaattgatgtgcatagtctgttgctgtgggtttcatcttcactatcatgtcctgcctccttaaacctagttatctaattgtaaactcttgattttgccaggggggttcattgtccccataaacttttcagaaagcatcggtgatttcaccattcttctgcccaagcttcaccataaatttgttgttctcacttcaagtttattagaatttatgttgctttgataggggctcttttcaaactaatgccttatccttcttagtgcctcaaactagatcctgttcagatatgttagaacaagttaatatgagtttattttggtacaaatattttttgaaatccctaattttttcattagaattttccacaaactttatgaagaccccttgtatagttcatcatgttcattatgtagaagcaagctatcttgctaacaaaaaaacagtttatggacttaaggccaattgccaggtggaacttgaggggtacctaataaaaaacaaagctttaaatagatgcaatgaaggcccaaaagaaaaatgtagtgttttaggtgatggtctgggaaaataggtaagagatatccttggaatggttttccttaactcattagctaataactgtaaaaataataacaataatagtgattcatagtgataatgtatcaaggggttatactattcaggcactagttgaaaacctttatatatgtgattactttcatcccatagtgaaggtggttttatcacacatatcgtgcagacaaaacagcagtctgtgaaaatgtaagctacttgaccacagtagcgtgcttgcatgtaggaagtcagattaagagaccgtcttgaaagtcaggtttccgcctctctctcaaccctatacgataatgcaccgtaaggggattctctcctatgttgttgtgtttttctctgacacaaaggtcaaaactaatagctgattaatgttcaaaagcattcatctctactaaactggtgtgtatgtgccgtgttttcaacactcttttcttctcattaagtcatttagttttttactgaccccaactgagtccaggtagagttggcaccgtcagcccctctacaagccagagagtgaagtcacagggtcctagtgaccctgtgttttccaggactagcaggcaggaccagcagtttaaatgttggcctccatgctgattcatattaactcaaaagacagattttttttttctggaaaatgctgcttccctttatgcatgaaactgtgaccagaagttcagccctctgtatatcaaatagacacaaaatccaagaaaatcaggaatggcacttttgtgtttagggaaaacacatacaaggaagtaggtataaaaatgattttacacagacaatttttgagtaatttaaaaggaattaaaataaggacattatgattttctctaggaactaaaacttccctcaaacatataatagggcatgaatattgtgggcttgcaactgagaataacatctgttaacagaggcatcatctatttcagataagtattctctactctcatgaaatataaaagaaaacaaaacaaaaataattatttttacttagttataacctggcactgacaaatgtattaaaggaagcaaaaattagcatcttccatcaccaaaatcttcaaataatttattaattttttattcattgtctcatttatatattgggcaggaagctgttttttttttttttttttttttttttttttttttgagttctctgtgctgagctcatgttgattttcaatctccttaccatctctagcacgtctatattcaaagattctgtaaaaggaaaataaattttaaaaaatttcttctcagcagcgttggtgactgtgtggcaccttctggacattgtcatatgaagagagttctaccagaggtgactgggaagtttttcacttttttattttttatttatttttttgagatgtagtcttgctctcttgcccagactggagctcactgtcattatcttggctcaccccaacctcagcctcctggtttcaagcgattctcctgcctcagcctcctgagtagctgggactacaggcacactccactctccccggctaattgttgtagtttttagtagagacagggtttcactatgttgcccaggctggtctcgaactcctgaccttgtgatctgcctgcctcagcctctcagtacttttctaaagaaaggataagctccagctgccacttttccctcttccttttgcctcctcctgcctagaacctgaacatgatgtctaggaagcgtccataaaagaaccaagaaagcagtgatgagagaaccaggggatcacaaagcctcgatgaaacccttgaaataccattgtgttgtcttataaaattaaccactgttatttaggctactatttgaattttcaaataaaacaattagaaggacataaaccaattcaaatttgggagaataagccagttttgatgaaaagagatttaaagctgttttattctaaatgtgaagggctttgcaggcaaagtcaaggattttatattttattaacgggtaacatgttcaatatagaatatatagaagatatttattttgtatgtcaaactgatgtcttagatacattccatttgattatcaaagtgagctcatgttgtaaatagagaaattattaccatctaagagcgacagaaggtgaatttaagttccaaaagttaagtgacttgctggaagtcacccagatagtacagagtcccatcctgacacaaacgtaagccttactgtttcagtgtcaggactgggccacctgctagctcatcgtgataatcaattgggatgtgtttaaaattgctttgaaatgtcaaatcctctttaatatttcctcattttatacagatcagattcccctcactgctactcatacccaaataatgcacctatcagcaaggaaacatctccagtttgaagatgatgcccctccctacaaggagagccaactaaatcacttggtaaaagaaaagaccaaaaaataaatatacattacaataaattagtaacttcatcctaagccataccttggtgcaggtcattcagaaaaccactgaacttttgtcttgagaccctatttcaccttaatcatttcacaaaatatactcttaatctatcaaaatatatattaaggtgtaacgatgagatgatgaacaagtactcttttatcaggctgtggtatttgctacactaacgtctggatggtaatgccaatgcctgttcttacaggacccactacaaacacacagttccccacgttagagtcccttttcaacacaggcacctattcgttttagggcacagaatcacaacaggttccatgcctcctggataaaatttcaaaaataatattgcggatacatgcattggtatctattttgaaagatagtttttaacccaattacatcaagtaacttcacaaacacactccccaacagagaaggatgaagtgccagcaaactttgaggcttagctaaatcggccatttccaatgcctgggaactgagctgcatcagcctcccgctaggagagagtcaggccgccacaaagccaggcagcaagagaagtgagacccgaactggaatctaaggggcttgcagggatagagcaagagatttgctgagggttccatcagcttaagtgaaagggataatcgactaaaagtaaggtaagccactgagcagctggaatcactgtaaaattaatgtgcttttacaggcactgctttccctgagggcagagcggtgtcacagaacaacttcccagtattgctgttctctctggaataacaggaaagaatgaaaaagagtaaaaaattaacctttcaatacagaatccacgtaagaccgttttagctgaaggactcaaaaaggcataacatcctcaaccagcagagagtaagtgcttgctcaaaatgtgtcctcctgcaaagatggaatgatctcttgcatgtacagatgccacaccagccgtagacactactgatctgtattttaaatttcacttcacaaaagtgatttgggatttcaaaagcaggaaaacaacctctcatactgtaacttgccgatcttgtatggatccccttccagtctttgcttacgtgtgtatatgcaattgttctcaagcatcagaatgtttaccattctataacctttatttaataaactgtattgcagggtaactttcatactgatacatagtgtgcccagacattaccttaatggttgtgcaatattatactcggtgcatttgctgtaattatattaagtatgcacattactggacattttgatttatgattgtgagaaatgttataatgaatcttcttttgctttttaaatagttggtaatgaatagtctgtgtagatttttagaagaaagagtactggtttaaaacacgctgaagttgtctgcattaaaacgctagtgtgctcttcagaaaagttcttccaaaatatcacgacactaacaatacgtggtggcacaagttgtagaatggcccttcctgaatagacactaaataatatataacagcccagctcgatccttccatcatcaccatttttactcctttatgtgactaatcaatgagcctcactctgataatgctggattaaaaaacctacagaacaaaaaaatacagtatcatcgtgaaagttcaattgataaaaaatattttatcacctccatattgtgaatgcctcagcagggtgtaagatctcatttctagaaccactgatatccactgctcatcttgaagacaaaattttcttccttatgcaaaaaaacagctccctgcccatggtgtattaagcatcctgatgctttccttcttggcctcttcaatctcattcacacatctggatgtatccattgtcgatcacatgtaggtgattgtacaattcacatgctctcctcttccaaaacgtcctcatatagtgagcagcacctctaaatgagtgcccgaccgcagcagggtagtgttctggtgcgagtccacagatcagcccttctttcttccattctccatagcaccaatcaatccctaacatctccagatttaaaaaaaatctaataatttttcaatctctttttgcaaaatctgcagttatgctttccttacgctaaaaatatacttcaaaatcctcagtgtgggattcagtatctgtcgatcctacccccaagcatctctcagatcgactgtcttttcccatctgtcaccgccctggttcagcccctcttcgtcgcctgcaccatgtccactgtggggtttatggtatcctcatcacaaccctgctcccactattgccaatttcaattgttttatctctacaaggccggctgcctccttgtctctgtactgagttcccatttctacttctcatcttcagcacaggctccatttaatactgtatcaacccccttctacggctcattatttttataatacagctcatttgtgagtctaacatatgctaatcatgcacagagggctgttgatatctctcacatatatatattaatcccctagcacaggcatcacacatgtccacattgaggctgaaaatgagtcagagcaatgggagaggtggtggagcacagcttggcctcctgcactcttttctccaccacaattctcgtatcacaccaagttgagatgctatcatcaacttctgaaagcccatgttacatcccccaaggatattaacaggaaataaaacttcactaccctgttatgtcaaccatgcctggtctgttcaagtaatagcatattttaaaatgttgcctctgcttatctgtgtttacagagtccagcctctgtacccacccaacttgtgaaataagcaagcttatcgaattttgcatctcaaggacgatgggaaatgggttaaaatacaaatttgttggtgactttgcaaacgaacagcacgatgctcttgaccatgagtgggaatgaatacctacatgggcaaccagagagtttatcaagggtggaataaggtccagagtcagtttacctctctacactacagtctgaaaaattataatatgatgatttaactgtggtgaaactcaacagaaatcttcactgagcaagaagtgttcagtagagaggaggcagcagaggcacgtttttagcaagaggacccccggatgcaagggtcttcggtgtaacagaggagagacacacctgaagaaattacagaggctcaaggaggctgggatgtaaacagtgatggtgggcatactacagagcaacgccagacatggatctgactttcagcctcagttacacactttggtctttattcgaacagtggcagaagtggagagggtggcaaagcaggaagatgtgttttacttagagaaacaagagcgtttcttcgaatgttcctcaatatctctgtgagttaggaggtgaagtcacttgagactgtgtgggatgtgtgtggtatgcagtcatgtatagttttttttatgtgtgtgtgtgtctgttgtgtatagttgatggtgtgtgtgaagtttgaagtgtatgtgtggggtggtgtatctggtgtgtatcgtttgtggtgcgtgtgcactgtgtgtagtgtgtgttctgtgcacagtctgtggtgtattcgtgcatgtgtgtgtgtgttatgtggaaagtctgatgatgggaaaaaaggtttagaaaaggatgtgatcttcagcgagggccaatgtgaaacacggcaaaaggccatttcagtacttcagagaccctgctgtgtttagcagagttggacgttgtcttcgatatatcttcctgtgctcttacaggaaatgctccttagaataatggagagaatttgttaagcctgctttggaaaactaaggattcttattccaagaacagtttataagaggctttacgcaaatatctgggtgcttttggagtttaattgcatttgcatgatttagagtaatttatctgagatgtgtaagactggctgtttgagcgtgatgactaaagattatttacaaaactaattcacagatgagttattatgctattgtttccttcatttatgaagcaatgacaccccatatcaaaggcatgtaatgattatattatagctataaacacatggtttaaaatactcagaaaatatcaaaggtccatttatttctccttttttaaagactctcaaatactccctgtaaccttctgacataatgttgaactaattcctaaaactaggtgagaaaatgcataacagcaaatgattattgatgtcattcttcacacctatattactttttattattttttatgttaggttatttttgtagtcacttgttctatctagtttaatcaatgtcagggtgtactttgcacacacaggccaattcaacaactttctgaagatgtgtggagattctgaaggttactttcaattcctagggtcagtttgatattaccgttaagtgcaagacccataattttaattaattcacaccaactaattattcagcttcttcagatacaatataattgcactgtctatttagcatgttattttataaaatgagatgagaagtttttttaggaaaaaaactaatcttttgttctgtagtcccttagagaagaccctcaaaagctttggaaatttgaaagaaattaaattcaaaatttttataattttaatattatgaaagacgagaaaaaataaatattaaatgcattttctctcatcaaatttctaaactaaaaggtaaatcctgtaacacagacaaagtataaatcataggctcacatcaagcagccaaactctcagttcatatgaaattccctaatagcactcccattttagtacaactcccttgggaaggggcatactgctactgaaattagaccgtatttgagcatatcaccttacacatttttttagattttactctagggattgtaacatacacaacacatacaaaataacctatcacagtctattgatattaacgttttactagatcaatgaagcatagaaacctcacctccatataggtcccttcgcccttacttcattttaaatatagctgtctgagtattttctctgcagacactgagcatcacttcagagggtcttacatgtgcttcaactatgaaatgtgatttaagaagctcattagaaacatgatagtcgattatagttacccctatttttacatagtgctttattttcacaccagactaaggagtttggaaaacacgctaaaaggtatgaaaagccttagaagacagagggtaatggaaagatgaagtatcaggaatgctaaggtctgcaattatcacctctcagagattcacttatctcccattcatccctgctcctagtaactgcttcacgtttctaacacccaggtattgcatcagaccataaagaaacaatggtaatctcctttccatctagtggaggattcaggaattagcaattaacttatcacacagaaaaatatgaagttagaactgttatcatggctgcttagagctgaaattcttatgggtgggtgtggaagggaaaaggcctccacactggaatgaatgggtatcttggtcaaagggttcacagacagtgtttctcacagcctacatgatgcccagtcatttaaacattttggtattcaacaaagataaattgtgcagaagtaggaaggatgaacagcatgcgttatcttttatctgctgtttattaatttgaaacttcttttcttccacattaaataaaatatctttggacacaataaaatctcaatacttgtatgacatttacatttttgaaagttttcatagctctcgatgatgttaaatcaacatggtatgttaggaaaaatgagtcagacacatttgaccgagactataaaatttaggggtggcaaaacaaagacacaacaaccatagaacctgcaagacacgcaagcattgtataccatggagagagtagctccagcatggagagggagactgtgtccatatacagccttaccaaaggaagaaattcacattagatctcacctttgcttatttcagcagcaagactatctcaaaagaaatgccttcttctcaaaagaaaacttacatgtggccaacaagcatatgaaaaaaagctcagtatcactaatcattagagaaatgcaaatcaaaacctcagtgagatactatctcctaccagtcggaatggctactgaaaagtacaaagataatagaaagtggcaaggatgtggagaaaagggaacacttatacaccactggtgggagtgtaaattagttcaactactgtggaaagcaatgtggcatatcttcaaagagctagaagctgaactgccactcaacccagcaataccgtgactggctgtaagcccagtggaatataaatcattccaccataaagacacatgcacgtgaatgttcattatagcaccgttcacaacagcaaaggcacggaatcaacctaaatgtccatcaatgacagattagataaagaaaatgtggcacatgtacaccatggaatactatgcagccataaaaaggaatgcgatcaagtcctttgcagcaacatggatggagctggaggccattattcttggcaaactaatgcaggaacagaaaaccaaatacatgtttcacttatgagtggaatctaagtctggacatcgtggctcacagctgtaatcccagcatttcagaaggccaagttgggcagatcacctgagatcaggagttcgagaccagcctgaccaatacggtgaaaccctgtctctactaaaaatataaaactgagccaggtgtggttgtgggcgcctgtagtcccagctacttgggaagcttagacaggagaattgcttgaacctgggaggcagaggctgcagtgagccgagattgtgccacagcactccagcctgggcaacaaagcaagactcagtctcaaaaaaaaaaaaaaaaaagtagaatctaaattatgagagttcatagaggggaacacatagaggggaacaacacacactagggcttagtggatggtggagagtgcgaaggagaggagcggaaaagatcactgttaggtactgggtataatacctgggtgatcaaataatacatgcaacgaacccccatgacacttatttacctgtgtaacaaaccttcacttgtatccctaaacctgaaacttagaaaacaaaataaaaattattcagcatataaaaaagaaatgcattgctatgaaattattatagtgtgttgaaatcattgtcatttctagctagtaaagaaatacgtagaatgtgtgtcaatttccaggagttaaaaaagttatcaataccccccttttaaaaatcaaaatatattatctttacacacgcttcctacgtgcatttagtcagaagacacaatgaacatacacactatctatatgcatgtgtagaatgcatagatagcgtaactgatcatattgcaatcctaatttattggcaaactttagcattgatgtatactcatataggtattttaacacacatgatcatacctacttttttaaaagcaatttaaactccaaaataagctaattacttttaatggaacaaatatatatatatatatacatacatatatatgcgtgtatatatatgcgcgtatatatatatgcgtatatatatacgtatatatatgcgcgtatatatatatatacacatatagaactctatgtttccagttttattatcaatgttacttattgagaatgatgaaattgaaagggctcacagtcgttctatttatgagcaacagatgtattaaagttgttggccaggcacagtgtctcacgcctgtaatcccaacactttgggaggccgaggtgagtggatcacctgaggtcaggagtttgagaccagcctggccaacctgacgaaaccccatttctactaacgaaaaaatgagccaggcgtggtggcagatacctgtaatcccagctactccggaggctgaagcaggataattgcttgaaccagggtggtggaggttgcagttagctgagatcgcgccaggcaaggcggtaagagtgaaaccccatctcaaaaacattaaaaaacaaaaagctttcatcacacgtggcaaaaacaataacactgattggcataaataatttggaagcccagaggaagagcccataatttgacctgcaaggtaagttttgcggggaaatgaagatggggaggtagaatttagagaatgattcacataaatttctatagaataaactacaaatgaatatagtcccatgatagccatagagctaatatagaaacacaacattcttatggtcccttattggtcccttagacagtgagcaagctggaactggtctttaatttctaatctactaaatgtacattttttaaacctagggaataataacaggaaaagcttaacaaccctgaaaaaacctagttggctaaattttcagtcactttcctctagtgccccaggaagagaatgcgaagaatctggttaatagctagctgagtccctagagagggaggaatccatcatgggggtagcagaccatcattgtcactatgcgtgacacacactctgcttttgagaatgcgtttagtgtgaagatgcctgacgggacccctgtgacatttaattctcctctgaaaatgttagcaatgcaggaacccgaagagctcccaaaggtcttacatgtcaaaatgaaaaaaaaaaaaaaaatcacgcgtaggtcacatcaggaggaaatacgtgttatgggagggaaagaagaatgttggaattaactgtcaatgtggactgtctgttttaaacatgcagatgccatttaaacatcaacacatgtaaattcactttagagagggaaaccaggagctctgaaagtttcagacatttactctaaggtcatatgacttaaaaaaagcagaactaggccgggcacagtggctcacacctgtaattccagcgttttgggaggccaaggcaggcggatcaaaaggtcaggagttcgagactagcctgaccaatatggtgaaacctcatctctactaaaaatacaaaaattagctaggcatggtggtgcacacctgtaatcccagctacttgggaggctgagtcaggagagtcacttgaacctgggaggcagaggttgcagcgagccgagactgcgcccctgcactccagcctgggcaacaaagtgagaatccgtctcaaaataataataataataataatgataataataataataattccagttaaacttgctttctttctgtgtcctggagatgggggattcaacactgataccaccatgtatccgacatgcagagactgtcaacacatccgaagtctaaaggcttaaaagcatctcattccttggttccctcattattttcaagactgcagtcacgttaatagttaagtcacaacacaatgccacatggaatacaacagcacaaactcttagttacaatcgacaaagtacataggattaaagaagaagaaaatacattcactagcccaacagccagtgcctccacctgccatagaacatttcctacatatttctgtcagggccagagttcacaggcaaactaacagaaataagtgttctatttcaggaagcagtatggggtgttttaaaatataagccaatttcaattgcatccgttccttgaatacctttctaagcagtctggactttgctaatgccttgggatttctcccgaaatactaaagatgattctaaactccagtccacaatcacttttacttatgctactggttgtattacattttcacacacacacacacacacacacaaaagcaatgtaatgtactattacattaccatttgtgagttaagtgttaggtcaaaatgcctttcaagtttttatgtgttcttacgtacacacatacatcctgttttctcatttacacatctgacccatgtcttctaatgatttatcctcagaaaagattcagcatttatgaataaagaccacaggaaaagggcaaaggattttgtaagaggagggagctgcgacaagctgggtgttagaaaacgcttcctgttggagtgaagaacataattgggctcctaaaaacacagagattataccacaggaaaagtggggttgacattctacatggtgggaggaggtttcaccttcccacatggctaatagtactgacagccccagcctgagaaaagaggtccctcttctaatcatgactgcgttggcttcccactgccccgaccatttgaatgggcatctcgagggagggaagaggacagggcttcttacaccatcgcaagagcaccactcattctctgccctcatccacacctaccggagacagatgacactttctgcccagcttccacacctaccagaggtggcactttctgctcaaaggaaagcccagctctggcttgaagaccagagtgaggtagggtttatgaaaactgagacagtatgcgaggagacccttttaccctaaggtccacagcgtcttctagctgctgttgctgcactgtgagccccaggtggcaggtaccagcctgcctcattcactaatatgtccccaagcaagggatgagtggcccatgttcagcaaatatttgtaaaataaatcagtgaatgcaaaaaaaatattccaaggcctgactcaagataaaggataaataaaaagtgaaccaataaagtagaaaattagatttctagaaattaactaaaaatcacacagtgcttaaggagaaccaatcttccatccagaactttgccagatattatgaataaagtaaacttggtttccaaagataaaatgattttattatagaatcaaggtttacatcagcataaatatgatgattataaaatagccattgaagtcatatttgtaggtatagattgagctgtgcaaaaaagaaactgaatgaaagcaactagctggtcatttcatttcaaaacatattttgcataaagtaattcaaactttttttctttattcttcagaagcgttttcaaaaatttgtttcatattatattctcagtcttcttagtaaaattttaaaaacaggttttataaagctaaagatgcactcaaatgtacaaaatgaaatataaccttctcttaactcctaaataaagaacgggaaattttgtgaatgtcatcttttattcttttttctttcctttaaatattcaggcattattgaaatttgaaaatatcccactgagaaatatatgaatccttgagtagaaaataaaatgggttattaaaagccaaccactcattattgttaaccctcttaaccattcaaaaaccttcaacaatccaaatactccctttcaattatgtagattagctaaatttcaagagagcaggaccccatattctaaaattttatgattttctaatggtcttccatttgtagtgatttttcatcctcgaatctgaatttgttgtgatctgtaagatatctcaaggaatgctgcagagaaaataatctgcatattttattccaagcggtttcttaggttatggtcttatactctgggctgccacagacctctgttaattcttggacttaccaagacaatttcttcatatattaggttgatgtgaaataactgtggttttcgccattactttcgatgctgaaaacctcaacgatttttgcaccaacctatacaaatagaactattattccataatagatttctggtaaaataattatatataattaataactttccactaatattccatcgagtcctaagacttggtgtagacatcagagacacccgtgacagaaggtgaacgacaatggggtacactgtgtcaagatgaaggactcaaatgcaaactaaggggggggcttcctttatgtgtttcaaaataatgggattttcagaacgatagttaaataagaaagtggtcgaacgcccccaaaacccttttcaaatccagaagtaaatctatattgtgcttccctcaaagtcagcactcggtaaacgcaaaataattggtagctgcttctattagtgatgttttgtggttatactccaaatcttggggtgggggaatcttcaaaggaatagaaaagccaggtactgaatgaaaatatgccacatgtcagattcatacgaaaactcaagagtaaatacaatcgactcttattgagcatgccaatacactgttggggcaaaaaactacacttgtaaacggcactgaaaacatacaagccctgtggaattaatcagctactagtgtttatcacaggcaagaggtttccaactggccaagcacatcatcatcatctaaggttgaataataatccccaaatcccttgtaaagttttacagtttataaagcagctcaatgggttatattttatttacataacaatctggtaaggtaggcagggaatttttcttttttttactatgtatgattttaaaagaaagctgaaagcactggtgtgatttgtataaatttcctgcttgctaacgtggggtgcagtgaaattagactcccacgtctgtgttataagctgtggctctttcattctaccctgctgtaaaactcaaatggttacaaaaccagttagtgtatctctgttgtcatataatgtaacagatgtctatacgctgccagtgtaaggcatgtacatgcacaatcactatgcctgctaaggtaagtgacttttcttggctgtttcttcattttccagagatagatttaaagtgtccaagttaagtgtcagtactcaagagagagagaggagagaggggagagagagagaaagagagagagagagagacaattttatttactgacaagcaggaagtttaaatcaatagttctttatagacttagaagtgaggtaacataaaagagaagcgatagctcagctgagtacatgtctgtaccatttaggttacttccacactgccccagaagttttcttttatatagtaaagtgcctgatacattgtaggcattcagtaattatttgtttaatgtatttttgaccaagttaaaccgaattttggcaggatgaaaatatgttctgtctttcagatgtgttggaaaggagaacaaaatgtcaagaatgatgtaatatgttgccgttccgaatttaaggtatttggtattttataatagttattgaataaatatttggatatacaattagaatccaggagtaattctattagcaatatataaaattgtgcgttcgttttttctcacgtaagtgtgacatttagtttagcctgtctgtaaagctgtacccattccaaaattttatgcaactacattgttatttatgaaataatatgaacattctaatattgttactatccttctatgggtttacatgtgaatgataattattacaactattagaacttttttgtcactgtagaaagaaatgacacttggtaacatttttccttaattaaagtttttactttctaatctttgcagacaaaatctaaaatctttaccattaggtcatccatccctcctctctctttttatgcacacatgtgcacactctcgtacacatctctatttgcgcattttagtttctgtgtgtgtgagaaagagtaatattgtgaaaattacattgagttaaaaggtcattagcaagtaatgaaacaaagcttgcattcaggacctactcaactggcgagaaaacttgagtaagtactgattaataaagttacgttaacaagagcttttacactaaaaagaataaaaaacatgttgattgaaatgtttacccttattgaattagtaattaaaagtgacacaccttctaaatttaagacgtcactgattgtttttgatatcactgatttttaactcaaaggcttaatattattttaaaatctcaaaaaaaaaaaaaagccactctctgtactggttgtacagatcaaccaatagataccatatattggcattgtatttacaagcaagttaattttaaactatttgaaagctaacatcctcccataaatcataaagcatcttacaagatagataacatcagagatctgtcctaaatgaacgtactttctgaaactttagtcagaagtgggtttttaattttactctctttattaaaaacaaaatgaaagcacaataatgacaatctatcatcttcatattaaacagcttgaggccttaagtctaacaaagcggcttgaaggtacaaactccttgtttgaccaaataaacatcttttacttcattagtagtcctcacatatacatgcacatagtaacaaagtaaggaggattttaaaagcagattaaatcaaaattgggaaaatacctgaaaatttaaactgttagtcaatttcccccagtaattccaattacagattttgatgaaaagtgaccctaaatcctgacagtcatttttcccttttgctttccttcaatttatcttagtaatgtcctttccttgcttttaaacagtttcttctaaatgaattaaaaagtcttagcatattatgattttcctcctttccttttgctgaatgtttctttgaaatactgagcctctggggcccataatcgatacgtgagccctaaccaatatacctacacttctttccaaaatccaaataatagctactccttcttaaggctttgctaggatagcagggaccagatttactctcagagcagaaaataaacaaacaaacaaacaaagtcacagaaataaaggaaacattaattgttggctgttgaataacaggaaatacagagtggtgattcctgagagaagaaaacaaaagggtgaattacttacccagttcactgcctggaaagagaggccagggaacagagaagggaagcaatccaagcagaatttggcagttcttggattagaggaaaaagaactgagacttgccggggggccaaaggctgctagagttgccgggcaaaataccagagagagaagagagcttcacaagagatgtgtagaggaccctcggggtcttcagctgagagctcacctgtatattatgcaggtaacagaggtacccaaggctgagctcaggctacagaaagatccaccggaaagcagtagggagtcatcttcagagcttgcacaaggccaatgtttggatttttacaggcagagtggaaaaatatcataaaataggagtattgggttaagtactcaaagtaccacctcaacaatgaaaaaaatgagtagtaaacaaaagacttcgttggttttacccaacaaacattacatgttcaaaaaaatccaaccctttgcaagtaatttaactgtgtaacagaacaaagcacaaaactttatttagagaaatgcaaaaatatccagcacttaacaaggtaaaatgtgtgatatctcgcatctaagcaaaaattaccaggcatgaaaagaaacaggaaaataagacccacaacaagtaggaaaataaaatgaatacaagagtgttcaccttataataccttcaggctatttgttttccttccacaagtcatcacacaaataaaccttttttattattattatactttaagttgtgagggtacatgtgtagaatgtgcaggtttgtgacataggtagacacgtgccatgatggttttctgcacctatcaacctgcgatctacattagatatttttcctaatgctattcctcccctagacccccaccccccaacaggccccagtgggtgatgttcccctccctgtgtccatgtgttctctttgttcaactcccacttatgagtgagaacatgcggtgtttggctttctgttcttgtgttactttgctgagaatgatggtttacagcttcatcgatgtcctgcaaaggacatgaactcatccttttttatggctgcatagtattccatggtgtgtatgtgccacattttatttacccagtctatcattgacgggcatttggattggtgattcctcaaggatctagaactagacctaccatttgacccaacaatcccattactataacccaaaggattataaatcattctactataaagacacaaacacacttatgtttgttttgtttttcacttatagtatcttcttctttgtatcctctcctcccagtgtgaggtcctagccactctgccaggtccagtttcagcattgcctccttataccagtttctctgtaaattatttatttcccatacacattcatattttcacattttgttttacacacagatctcttatgaagtcttgtcatacgcttatattgagtttttgtctagactctagtctaaatcaatcaaaggcaggaagagtgtcaaacctattttttatcctgtcacctcgcacagtgatcaaagtgtagggttcaacatgtgtgtccagtgcatgaacacgttcatgaggcgtgcctacagctagtccctgtggcccactgatcatcctcggtgtgttggtatgttcagagctgacccagtctcttgcctattgtttcctcctgaaatggccatacgtcttctctcctctcccgcgctggcagttaaagcataagaacggagcaatcagaagagtttttttcatcccaaacctgctgctcccacttattgacttgtgaccttgggaatcttaccttatcactctcttaattcctcagtgatgcaagttagacaaacaaacccacagcagagggatgtgttaaggattaaagggatgagtatctggtatatcacagatataacagacaataaatggtgtgagtatctggtatataacaggcaccaaataccttttcctcccctttctgctctacctctgcaaagtttaatagtggtaaagataaaagagctgttcaacattcctaagatagtgataggaatcaatgtctttgttgattaaagtttccaaattattactatacgattaagagtactttcaaaaaggatgctttgaaaatttacaattttttttctaaatttacaaagtactaaatatcttttttggtagtgtagttacactacttgacacgtaattcattcagaagaaatgaataaataatatatcatcattgtgatttattagacttttgccttttattacagtatatttttatttctgcattttttcacattatcactatgaaattaccagggtcatagacattgttaattatcttcaagaagaaaatcaaaaaagctattccattaatttagttcatattttaaatgcctaattcacagatacttttcatcatagactgaaatgaactctttaattacataaatacttaatataaaatattggatcattttatcctccgatttctttacatttgaaataacattgctaaaagtttcctattttaacaatttcctttcactctatggttccatatagataattcacatgtaattttatttgaaaacatactgtatttaaaatagtttaaacataagtgagacctgaattcaatttcatgttatctgcatatttgaagagagtacttttttttgcaacaatctgagcactggagagagtttaaagtggaattagaattcccccagttggcaaaagcatctcacctattagcaaggtgactacatatggcagaatattctatcataagagtaggaaaaacccatagctcttagggattaaaagagtgaaagctgtatgcagttgtgggttcagggaaggctgtataaaaacataacatttgaggtaggccctgaagagagtaagtaagattttgatgaaggaaaatttcaacataaaagacatgttgtagaagcagaaaaatgctggacatatttgagaaaaatctaagaataatcactgtctacagaatattgcttattttcaaagagatggtgacaaggttgaaaatgcagtaggggccaggcacggggctcgtgcctgtaataccagcactttggaaggcagaggtaggcggatcacttgacttcaggagtacaagaccagcctggccaacatggtgaaaccccaactctcctacaaacacacaaaaattagccaggcttttgtagtcccagctactcaggaggctgaggcaggagaatcgcttgaaccctggaggtggaggttgcagtgagcctagatcgtgcccctgcaacccagcctgggtgacagagcgagactccgtctcaaaaaactacactaaaatataaaataaaataaaatgcagcaggaatctgagaatagaaagattttgaccagcctacaaatagagagttaagcagcgaaggaatggaaaaatcatatgattttaatgagacattaattggtggttccaaagttgtttcctcatttgtacaatgacaagctttggttatacaattctaatttccagttctaaactcctatgcagacccatgtgattgtaagagaagttaggcattatgtataagcaattttgcttaaacggaagttctgtagcaggttcaacagacttatttcacacagtcttactctatatagtacttcaacccctaaaattcatgaaaagtgagaaatataaacttatgttctttcctgtacagcatggccttcctaatttcacagccttgttccatgtcttcttcacaggtcaccccatttgattcaaagtaaccattcacaacaaaccatacataatgggactagggctttctctgaaacctgttatcagaaatgttgcctggcataaggatcctgaccagtgtgggtgatctatattgggtcatatatctgctttccaaggtgtttgagtggctgatacccaaagtcaacagtgcgacagaaaccagaagacataaggagaaaaaacaaataaggggcagtggactctacaaacaagaattatataggaaatgtataaaatagaaggaagccgagagggtatgatttgggtatttcacatccgctcactcaaatatcccccccttcccctggccagacctgcctatcttgacttattgaaccataaaggatgggcagctcctaataacctcctccaggtgccttgtactgagagtttagcttaaggcaacttctatgaagaaactccacattttgagtcttggagttctgagcctgggggtggcaggtgtcccagcaacaggcattcagactactgggctgtcagtgcagcctgctgcctcaaggacttcactgtgatcctgggaatggcaggcacagccacacccttagcaggccagttcctctgtgtagttcaaatttacccgaggccaagcttagattttacaccttttaccttcccaatgacatcacctaaaaatctcctgccttaactgctgctgtgcaattatcaatgctgacaaacagtggaaatagtataaaaaatatagaacaaagtaaactgtgtcatcggaatgtatgatgcatctgcagagatttccctacaccaagaatgtgagttctgagaccttttcctcttcctcatcactaactgcgtattccattaactaaacagcaacctcgaaagaaatcaatactcggaaggtcctgtagtagcagccattccatggatgggacaccagaggtggggcaggagcaaggaggggttcctcaccctggcaggaaagctagaagcctagcctttgtcagtgaacacagcaaaccaagcttcttttctgaaatcttcttggaagcagatgaagtgcacacaaaagagggttcttctccacccccaggaggtgcattctggtggccaatgccagggaataatttcaaaggactgataaacctactaggaacaagacaggtcagtggccatttatgacctcccatacagaagaaaacaaacaaacactgctcctggaagatccagctcagaggatataagggcaaaatccaatttgccctgttttccataaggtgttgttatatatggatgaagggtttcagtttattttgtttcagccccataaacaaacatcgaaagtgtgtttacctagcgcctgcttcccatgtcttgctagagaacataagcaagacaaagaagaggagggactcccatcccagcacacctcagggtcctggatcctcaaggcactctgagtcctgagttgattctaggtatggggcctcttcacgggaaggaggcaattgtatttggaaaggatatcattatatcactgttgacacatcattgcattcctggtgtggtcactcattgagtgagtgctgcactgtggctccttaaaatggcttgtagttacgcatccagtggagccaggagggaaaaatcagacatcagtaacccacttgatgatactgcacattgtatgcaatcatgaatgctgacaagacacaggggaaagaggagaaaaataaatataacaaaggaaactgtcatgaaaacagatgatacatttccagggattcccctgaaccaggaatgtgcgactttcaagaccttcttctgttcctccccactaaccaagtattccattaattaaatggcaacctagcaagaaaccagtagttggaggtggagggttctcttgtctaggaagtcttagataatcccaagagacagacctccaaatcccactgtgatctgccttagaaggaactctacagaagccaggcaatacatggtatttacttcatgtaagaatcgtctactttcaagcgcttcctgtggctgaagtttgtctgctcatttttgcatactcactttgcatgaatatccatggcaaccaaaagcatgcctaccttgttagcttttccggtgaggtaagaattattatagtaggcagggcaacatgaaagcatctgaagattttttcccaaactacccaaattacacaacaaccatcatgctcatctctagggccagaaagcgagatgcaggataaaactcagtgattatagatggaatccaacactgagaaggcgtgaatgttattcctgttgcacccctctccacttcccattttaaatgctggcccatttaaaatgctgatgaccctgagaacgactgtagattaacaaaagcttattccacctgatggctggaattgagagttccgttctgtatatgcacatggtcagaatataatagagcagatttacatgctggctggggcacctttttctgttcacggtcatatcagtctacagtagcacaatttccttcacctggggtacgaactcagtaaagacgttggctcgctatttttaaagcaatatttgttgacctaacacgggattctccaacactagcattcatcagcattaccagaacggagtggtaaatcagagctcagggccctaccgtcagcgtttctgaaatattcagtttagagttgtgccagagaatttggctttctaacaagctccctggggatgccaatgctgccgatttgggaacactgctttgaaaaccattggtctaagatgaccaaagactgcagatcatcttcacatacggtgggagactcagacatagcaaggacagcggataagtcctttgaaaatacagggcttgcgatttcagacatggggcaacctgacgacgatcaccaatgtggcgagaggcactcagattttcagcgcagataaaaagatgggaaaaccaattaggcagctactgagcaagaggtaaagaatgcatatatgcttgacataaggaagtatcaagaggagataggaaaaaaggtccataaacgagaggtagtgcataatgagtaatcaaaggtgggcataaaggaaagtgaacgttagaagcaattccaaacttctttttctctcctacggagaaaacagtaagaaacctcagaacatataggataaaagcatctacccaacgtttcctcaaagaccaaaggaaaaggtctggactcaagaacatgaaacattccgtttgggtaacaccaaatggggacttgatggaatagtaatgcccatcttcagaagaagatgaggtacgcagaaatggaattcagctaagaaatcaccaagaaaactttggctttgagattcttctgaaaaaaaaaggtcacaggtgaagctttgggaaagatttaacttggactattttacatagaccatgtataggaggaaaagtaagttaggagccataatctcaaggaatgtctactttggaagtgcaggtgaaaaaataggttaatgaaggaacctgagaaggaaaacgaaagaattgggagaaccagaccacagaaggtcagtggtatggattccaactcagaagacgacttcaaataagagatgaggttgtagcatattcttgaacaggagaggggaatccagctgtaatatctgttatcattgacaaggtctactagacaacaaatgttagatacattattgtatatataatgcagaaataacacattacatatctttaaaaatgatatagcttagttttcattagtgtttaatacaaacgtccattttacagtcaattgctctttaagtatctcttttacatttttctcttccttcttttcaagagcaattttaagagagaatcagaataggcagagagttaaaagaaaggttaatgaaaatggggagactctgctaatgtatttccttgggcaaattgcagaacactggcacaatcagtcggattgtttgcagcctccaggttgctgcctgtaggtaactggggatgagccattctctgtgctgagtgcctttcttgcagtgtgatgtgtcaggctgttccagctccaatgttggctttcctgtggggcgctcatcactgtcactcatactacaaagatgttaccaagtcagaaaggggaaaaagcccccaaaaacaacaacaacaaaaaacaacaaaaagctccacgatgcatgtttctagaatgtattttgtttacacataggtattagaagtttaaaatgaataacaagagacctactgtccgaaaacattgttacatacattatttttatttaatcataaaaccaaatgtaacttttcttgctaaaatgtctcctgtaagtataaagtaaggtacatttttgtttgaaagatgacacattttgtaaaacaaaaaactttaaaatctttccttttgcttccaggtccctaattttccttgctcaccacataattggcacattttccactgtgatctagaagttgaatgaaattcttgttttaacatttaccagtaaactttattcatttgggaaatgataagaggtacttagcgtcagttattggtgatccaagtactaagctctgcactccataatttacatgatatgtaacagaaactatgcaaacaagtcactatgtccatttatgaatgaagaaatactcaaagatgttaaatgcctcattcgaggtcacattataagacagtaagtaagcttgtatttgacccaaattctacacacccaattacattgcactcaatacaatttttttttttttttttttttttgagaggaattctcttcttaactgtgaattaccacttccccacgactcagttaagtcaactgtgcggtctgagacttctctctttcttagtgcacataagctatggaggcatgatttctttttattacttctggtttctacttttgagtagttttaatttcttaatttatacaaatttcggttgtcacacataaggtaacagttaacaggggacttacaaaaattagaaatactcctcctgcttttttggtaataaagcatctcctgtactctataaatatacacactatgtacccacaacaatttaaaaaaatgaaaaaaaattaaaaatgaagtcattttgttttgaaatatttaccatgcttacttaccaagaataacatcactttttctctttgaaaggcatgtctacatattcaacctactaggaagtgctttattagctatactatggctatttctttactgttcttgttttatcaaaaaagttacatcgtttaagttagcaatctgacaaagtattctctttgaaataaacttccaaaaataacactgtggttttagaagcttaagcaattcttgctagaataattataactgaaactcataaaatgtcctcataacattcatttgtatatattggtagtgtgttgtttgcattcgctgtttttgcaatgcatttgcaagtttagcagagtatcactcttctgtgatatttatttttgtgtttactattcctcttgggcttccaacatcaatcttcctttgtaagtcaagccctggagaataatcacataataaataaaaattgcacaacaaataaatccaagccttgtattgcgtctacagactgtatggcttccaaacgtgtgttatctgtcttgaatgcacggttctcatcaagcccataatggagaataacaagtatagagatgtttccaatacaaattatttggaccttatcagtgttgacatatgcacagaatacaaacaaagacctattactaaaatgcttgaacaaaaaaatactcatttattttttgagatggagtcttgctatctcacccaggctggagtgcagtgatgcattctcagctcactttaacctctgtctcccaggtacaagtgattctcccaccgcagcctcccgggtagctgggactacaggcaggcgtcagcacactggctaatttttgtattttcaggatagacggcatttcaccacgttggccaggccagtctcaaactcctgacctcaagtgatttgtcttccttggcctcccaaattgcttggattaaaggtgtgagccaccgcacgttgccaaaaaatacttatttttctttatttactacttacatgtatgcccaaacctcagtgatatcgtttggatctgtatccccacccaaatctcatgttgagatgtgatacccagtgttggagatgaggtccggtgggaggtatctggactatgggagcagattcctcaagaatggcttgggccatccccttggtgatgagtgagcttttgctccaagttctcatgagatgtggtcaattaaaaaagtgtgtggcaccaccctgcttacacacacacacacacacacacacagacacacacactctttctctcttgttcctgctctggccatgtgaggtgtctgctccccttttgctttctgccatgactggaagctccctgaggtctccccaaaagccaagcagatgccagcaccatgcttcctgtacagcatgcagaactgtgagccaattaaacctcttttcttcataaattatgcagtctcatatatttctttagagcaatgcaagaacagtccaatatagtcagcatttgactacatttaagacttcacaatgagtagtatcccaacaaatatacaacaggaacagaggttcctgttatgaaatccacaatttctccataacacccgtcagatccacctgtcagatccacccgtcagatccagtaggactctgtctggttgtactcttctacaaagtaacactatattgtcaatttaatattttgggctgggcgtgctggctcacacctgtaatcccagtgctttaggaggactagtcaggcagatcacttgaggtcaggagttcagaccagcctgaccaacatgaagaaatcccacaccaaatatacaaaaatgaaccatgcatgttggcaggtgcctgtaaacccagctacttaggaggctgagacaggaggatcacttgaaccgaggaggcagaggttacagtaagccaagatcacaccacagcacttcagcctgggcaacagagtgaaaccctgtctcaaaaaaaaaaaaagtattttgtaatagctcataaatctaatcatattttatttgttttcacaacctcttatgcctttaagttttacactcctaggtgtttgctcaattttctgtaggttgaggataccccaatcaagttcgtgacttatctgcattcctgtctttcctgcggcatctcctccctacttatcatttctttccctatctatcttctgaagcactgttcattcttgcacatgcagctcatatcccaccttcccagattctacagctcagcaggaatgtcagtttctctcagaaagcttcattatgtatgcccagcaccctacattggattcacttttccccatgttcatttttataactaaatgcaagaccccccgacatatacagccgcctttgtgttactgtgccgtaagttcttagtgcattatcttacacatactgcagattcaataactatttcttcataatttttgtttcttattctccaatatgcaactacatataatagcaaaatgaaaatatatttcccgaaactaaactaccgaactatcctccccaaattatttgcctgataagaataaaccagaaaatcttcctcaaatagttgacaagattactgcctcccaggtgagtccctgtgggaacctctttcagagagaagccagggaactcggtgacacaaggtgctgaatggcagaagcatcatgctgcacggtgggtgcaaacgcagttttgagactaattttaccccgcccctcaaagcttcctgtcacgtgtgtttgttgcgaggtgtctacagtttttcatggttagttgtctttcagtgatttaaaaatacatcctggtttctggtaacgagagccttgccagccttcttttgggttttgggttttgtaattcaaacatgtttcagtgttgttgtatcccattctcatttgtgtaagcctggcagtatgaattaaatccacagctgggagactgcagacaatggggcaacatttatagtggcaactgtggctttcttctgtcatgaaagcctcagtcataatcaataaagctaaaaggtagccatcccagaggccccagttaggtcatttcaatgttccttgttttcctaaaggcttcacaatgacctttctaaatattaaccagcttcggtccatgtgccaagtcttcccaggagaggtttttgtatttgactcacagtatttttcctccaagcaaataattattactgtttcctcatagcacaatccatttgcttaaaaaaatacataatacatagctagagagtttaactatggaaaagcccacatcgtaatgatttttttacagtctccatgaccatggcattggaattcattttcatttttatgcaaagcacatctgaaatgaaaatgctgagtaatttactcaaacccacaaacaatgatggatgcttgtggtttttattttttatcttatcagtttggctccactgaatcatctatttttaattttgccaagaaaccacgcataattctaccccaaagttgtgatgaaaatgtcaagttgcttaggtcatggagcaaacacaactgtggacagaaataatgaggtttgtgagcaaacaggtgcggatccctcacgaagctaacgctagccattgccaccacatcttaatgccaaggagccaaagggctgtgctccaagcctctcttggagatgctctttcagtcctttctcatatgaggatcaccaaaacgctgaaaaaggaagacagcattgcactcaaattaacgattcctaccatgcggcaggaggatagtataaattctttctaggcacctgtgagtaagcactgagtaggtaaaaacagtgtgtactgtctctccaactgagcacctcacagataggagctcttcttctggtttttgctttttttccccagtaatacccttctgtcatgatatcacatacacacacacacacacacacacacacacacacacacacacacacacacacacacagagtcatatgcagagacattcagatacacagacatgcagctctcattactaccgttttgctagctggcacccctgggggaatattaaattacatgaaaaagtattaagtactttttcagtgtgagttaccattcttagacacatatgtaatggcatgtgatgaatgttcaaattcaaaatagttatgtgtggagacaggagaagttttcagggaaactttatttagctgatgaaatgttttttcccaatcatctacacaaaggaatgtttttgagaaaaacaacacaatgacttgaaaagggtactttactatcacatttttttcttataaaaatctaaaaaaaaaaaaactaagatttctgccttcagttttgaggtaaacgtcatatgaaagagcctagcaacaatgtatttctcatcccacacacagcaaccattttaaatgtcaagagcgtttcatagaaatactacttttttcaggatggaattgtgtttgaaaatttgaaaatagcaggtgaaatccagcaacacctgattgaacataagaattcctcaaaaaatccttcgcaagttgggatatcatgccactcacagttctgaacaaaacagaagtcacaccctgcctagtgaccctggacacaattctattaaagccaatcctgacgctaagtcctcacctgaaagaagcgtctcagatgctgttgaacatctagatccgagagagatgatacagaaagggcgagcgcagggttactagcacaggctccagggacggctgacaggggttgaatttctgtctcctcaactacctgttgcctatgcttgaaaaagttgtcttctctgagcctcagtttccttatcttggaaattatattagtatgattatgtgtacagcactactctcatttcataaagtgcttaaacagtgaaatcatcaggatatgcacaccatgacatgcaatatgcgttagttattattactcttgctgttgttactgatgcagatatatttaaggagagtgatctaaatctagacacactgagaacacatcattttataagtgcttttctacgataccatttaatgagaaagagttgtagaaaggactgcttacaatgacagattccaagatctagtccgctgcctgccacgggtaggtagccttgacctgggtctgcccctggaaacacattgcttgtgtgcaaatattctctatgcttctcattagctttatggtgtttcatctttaacatggggattctaatacaatttttcccctttatttctttttgttttgttttgagaaaagttctcactctgtcatccagactggagggcagtgacaccatcacggctcactgcagtcttaatgttctgcctcaagccatcctcccgcctcagactcctgagtacctgggaccacaggcacccaccacaacatcgtttcattaattatgatgatgatgatgatgatgatgattacagacagggttttactgtgttaaccaagctggtctcaaactcccgaactcaagatatcctctggcctcagcttcccaaagtgctgggattacaggtgtgagccaccatgcctggcccttaaaattctgtttgtatcatccaataacttaatgtgtatgataaggtgcttaaaagtatgccttacacgtgtttggtcaaacactattccaggtattcctgggaaggtatttgtggatgtgaatgacatttacacttaataaagcaggtgaccctcccttaggtggtgggcttcattcaatctgaggggaactttaagagcaaatactgaggttttccaaagagattctttctcaagactgcaacatcaaactcctgagtgttcatcctgccttatcgatttttgacttaccagtccctataaatgcatgagctaattccttaaaataaaactctccagatagtatgaaagattgatggatgacagagagacatctctatttttatttctctatctgtatttcctctggagaatgctgactaatacatagctttataccttctatggttagagaagctgtaaatcctcaaagcctatactgcccaattcttaccatgaaaaataatttttatttgcatagatacttgaacgatacgctcgactctactgtgtagttgaatgtaggcattttagtctgtttgggctgctatgacaaaatgccatatattcggaggtttttaaagaaaagacatttatttctcattgatctggaggctgggaagtccaagatcaaggtgatagatcaggtgtcagtgaggacccactttctacccccacagatgctgtatttttgctacatcctcacatgacagtaaaaccagtgtcctccaggcttgtctttaagctccgttgcctaagtgatcttgttttagcctccttagtagctgggaccacagatgcacaccaccatatctgactaatttttgtactttgtgtagagacagagccacacaatgttgcccagattgatcttcaacttctggactcaagtgattcaccctcctcacagcctcccaaggtgctgggattacaggtgtgagccaccatggctggcctgggctctcttttctatggatactgatcccatttgtgaacacttcacccttatgacctaaccacctcccaaatgccctatgtcctactaccataaccgggagggtgaggatttcaacctcggacttttgtggggaaaggcacaaacattcaatctataggaatctggatatacacatcttctgaatacattaacattgcaccatctctttctgaaacacaccagaaactcgttactagaatcatttatttaaatcagggaatttatatggactccagaatacaaatgtcctgaacaaacgaagtcatcacctgccatgtaagaacatcagcaccaacatctaaattagcttaaaacctgtcactatcagtcttagctaacttttccttaaaactactctatgattatcattgattcatgtatttattcaaatatttaataaaatgaaaagttgctgggagcatgaagtatattgtgcaaaattgttacagaatatagtgtttctcaaaaataacaaatagtgtaccttaatagggctcacggcaacaagatagagtcatcaatacctgaagaggaacataccacgttacctgtgatcccatggaagatacaacattactcagcccaggggttgattggggtatctaagctggggagaacagggggacgagaaagtggagaacctccagggcttcctgcaatatgatcaaaaatagtgagggagccccatattggaggataagcacagggaggctctcacagatacatgagactatagggtcagccccgctcactgtcaagttaagatttggtacacttacttctagatttccaaacttcctccctgtcttcaataatgattaagttccacaagacaatccactaattgatgagaaatagtgtaagtatttttcctgttctgtataaacttctcactttaagctctaccctgaataatcatactcctggtttgcggtcagcgctggttgactcagggaatgcaggtagtatgaatgcacctgtaggttcaagaccctttaaaggtcttgctcgtccaaaaatagacagtattttatgtcagaagctttacttttaatgccacgtagcctctgtagaaaggcacatttttagttaggaagcagggagcaactgggtcattaacaggcaactgtgcctgactaggcgtgacccatggccactcctgatggaatgaccctaaggcccccggtcagttaatgtcagcatctgtgctatgtgtagatgtttgagccttcagacacggaaacacagatacaactacatggtgcctggccaataacgtgttcgatgaatgtcatgctgcttgttttctagatggtttccagtggcctggtgaagcatgaatttattttacacacacaaagtgcatttgttgtgttgcacaaatgagcacatgagcatgcttcacttcacagctttcacatctgtgacatagtccttcgaagacaaagtagagatgaggctgtgtattctttctaggatccaattactctgagttacttggtgactggatccacaatgggcaaagctgggcccagagggagatgccgcctggatgaaaggcaggctctcagtaactagagatggaatgaagatggggttgagatttatttccaataatcaattctgttaaaaacatacgggaatgggattgcctaatttccataataaataataacaatacagaaattctgtaggctacaatgttgaaatggagcaaaccctcaggatttgccgtgttttcttcccagaatggctgactggcctgcttactaaatctgcaattataaactgaattttgcccacacattgcattctgcatctgtttcactgtcccagagggttgccaacgttgcggccacgtacaggagaccgaagcatttaagtgggatcttctgcccccaccttcattactactctatctatacctctgtttgcaacagtgttatctcaaaaggggagactttcaatctttacccaggaggcaaaaactccactgcctgataaaacatagcatcatggcaactaaatgcttaatttctgcttgacatttttctctgccatgaagatcaaaatttctcccagttaccccagcaaccgacattgttgcaaacttccacctaagtcatttctgcccttcttcagtaaacaggtattttgtttcagactgcttttctatcttagccttctctgttaaatctaaatgtctttgcaaaccacactgtgatgggatctctgctttgctttttcttatattctaaggataattaatactcagatcgtaacattatttttaaaaataaactcagcgatgaagtacatgtgaggcatatcaattcttcaaactcaaaattctgtggacagtaaatattttagacaagtgtcatgctgaactattccgttgacttacagcagattattctcacagacaattttttctttaagcatgccaacttttaaaagagtacactcaagtatttgccattgacatagaatggattagtagtacagcctttacattgggctggagttattttaatcacacagctctgataaatttttaatcagtagaataaatcaggtaattataaaacttcttgttccttcgtaaagactttaagagtaaaaataggcattttcttcagcttaagacaaaatgaccccatcactgaacaaatcgtttatcatttaatgatatcgcatttctcaacctttttaaatatcagttttgtcaactgtaaaatgtctgtattcccaaatagaggtgttctgagtggaaatgcaaagatttattccaagaatctgcttcaataaagccccatcatactctttttaatacatgcacttttatgtgtaactttggtgtacaattaatttgagaattactatgatttttattccaaagcatggtagtagagaattacaaaaatattggtactaatgcaagagttagattagagatgcatgtcatagttcttgcatatttctaatattaagttagaatagttgcaatattccatagttgagtaagtgcaagagttcaatgcagtagttgaatatagttagttacacatttacctcgtatgtgatctgttccagggctctcttaaggaaacatacaaaaatatcttatgtttgcaaattacgtaaaagtacatactagtgtggatgaatcaagacctcatcagagccatgcaaacaagaaacctggacgtttacacctggttaggttcatggcaaatctacctcgggatattgtactttgtaccttcaaagttcttcggctttttctagtttactctattttcaaaactaatttctgggtttgataacacctctgacatactcataatagaaacacagcaattaaatctttaaattaggtccataaatttagctgtcataaaatgtgctcacgggtgagtcagaaatagaagccacaattccatagttccggttctacaagtatttttttaactcagatttttttcgcctaattcataagcgaatattaaattctccttgaacccaaatgaatcatattgatattagtttaatgttgcaattactcttgtgttgccttaatattcagctttatattactttttgaaagaagaaattatggaaggtttagaagagaaccttttactagaactgacaacagaggcatgataaataaagttaaagtaagggtaagcgtatctgaacataggtctgggcatacagtcaatgatcagaaaatgctttgagattctgtgaaaagcaaggcttttctgtgaggctcaattgctgtagagcctcaaatctaccgggaactattgcttgggtagtagaggcatggattctgagtctagacaaaagagctcatctctgaggcagaaatatattccaactacaaatgctatcagctatgaaaataaattcttgagccaggctttatctccttcaaaggagatctgcaagtataccccaggcaataagccataggaaataatctagttatggtcttggccagagacaaaagtaggaagttgataactacttcaaaccctttcagttcttaccattttgtgatttaaattcacaagctatgctggcagattcatcagctggtcaaataatgaatctattttttatcttgtcatgccctgtgctaatctcagtccaggctctctttcatgtaaatgagaggctggtgtttgaatcagctgtacaaagctaccgcgaaatgagatactggagctgagtgacaaagagtttaaatttataagacttcaatttcagtcctacatttctaaagactactgaatctttcataaataactttcggttgtttatttcatcgtgcaaagaacaggtgggaaatcgctcaatgattacctgcccacataggaaaacattcatcagatgattcaatatgttatgtttggatggccaaacagtttccaggtttgagtgagtgagaagaaaatgaaagaggacggtatacgaagtagaaaaagctgagtgcaggggcttacaccaaaaatcctaatgctttgggagaatgaggtgggagaaccacttgaggccaggagtttaagatcagcctgggcaacaaagtaagacctcatctctacaaaaacttaaaaaaattattctggcatggtggcacgcaccagtagtcctggctcctaaggggcctgaggcaagaggatcacttgagttcataagttggaggttcagtgagcggtgatagcaacactgcagtccagcctggacaacagaaccaggcacttctagcgaaaattatgttgagcagcataccgtatgttttaggactgactctggtaacgtaagtattagagaaattagagttaaccttagaagttttgttaatctctcctctttcagggctctcatttaacatgttctattttcttgataccttttttttctgatccaaaaaactaatgacaccttcgccaagaagagcttgctatgccttctccccttttcctctcactgaagcctggaagatttgtcctttttccttgagactagtcatctgtgtttgcaaggcatctccatccaaacccttacattggctgggatgaggtttgaggggctgctacaccctagttaaaaatgtagaaaataacactcttgacatgagtttgctttaccattggccaaataaactcctcaattaagctgcgcattccttgaaggaattatgggtctgtctaggggtgatgaactcctcatggtcgagtccccaatgtcatggttagactttattatatgtcagatgaatcaaagcaggattgtccaagggcaattcagggacaaaacccaccctgctgatttcttcacagtactcttgcttggctgcgcctcctctgccaatgagccaagtggagcttggtcgtgaattatattaacctagagagtaggctggagtttattagaagtacattttaaacaaaatatcagcacgtggaacaaactgaaaatttattttcagcaaactctgcaaaactgtcaagcaaactcataatggttgcttctagagagttaactatgctgcttacccacttctagaatctcaattatttggttgctaattacactgtactatttttgatattaactattaatgaatattacctacaatttaaagtgggaactcaagcggagagatttctaggcctgagagaatgtagtctgtactctgcgggtttatttcaagctgatggatttaaaaattatcacagtcatcctattttttcagaaaattacatattcaactttagaatctatactctaaatcaacgtaaaaggtaaaacttgggaaagaatagtgagagaatagagatatctcatttccaatacatcgttgcctaggtaacaaggcctatccaagcattttgaattagtaggcgttgatcatctatatttggggattcaaatctgcaatgaaggcaagtttccatggtactagcaattacataactgttttccagtatttttcagaaggcagttgtatgtcatatgggcatatttcaggctcaaatatattaagcaatcaatcatatcactaggtaaaagtttttcacattgaattctgagattcatattcactatcgcaggaaataatttagtactgaagaaagccttgaactcaaaatgtagaggaaaatgtttgaagataagtttacctcattgtggttaagaagcagtattctctgtgatcaaaggacagactactctgcatatcatgaatgtggccctttctaggaagcaaacccatggaaacattatttttcctacagtgtgattttgagaagaaatactaacgttctgtggttccctgtttgtccagtgaaactgtaacttacggaaaaatgtttaggatatgctcttgtgttctaaaagcatctttcagcaaagcgacgcagtcaagataaatggaaacctaagattagtcaatatgttttttcaacaaattagaattaggcagttagggtgcattaataatggtcaataatattgtgcagatttcagtgcccattaatttgttcacatgacttaacgagcacatctgcataataacagaaggatgcttcacccagcagccacagctgatgttaaccttccacaccactaactttctgattactcattatctgtacttagaattagtactatgctttgtccaatggactgacacatattaccctggttcaagagacgaaagtggccttatttccaccatgcagtcattttaagacttggtctcaagatacaaattcttgatatgaatttggagcatcctgaagatcctgcagttcaagtagcgcaagccatctctatgtttccatggtaactccacaatctctaacaagacaagaagccaatctaagactgtctaccaagccacattcttacttcccttatgcaaacttggcagcagtgctgtgtctgtgtgtgtgtgtgtgtgtgtgtgtgtctgtgtgtgtgtgtgtgtctctgtatgtgtgtgtgtagagggatatttaaaccacaagccaagattcaaaggtgtgcaatgtatgtaaaacataggtattacacacacagaaaaatatgtgtatacattctacagctatcacatatgtttattatagtataaatgtgtgaataggttaatcactttctgaactgttgaaaactattctggctatcccaacagcagacaataaactggcagaaaaagcacaggactaaatcagccagggtaggtttcattccgaactctgacattttcctgatgtatgacatttgcccagtaagtgatcctctcagatggacacttccccataaggttactgggaaaaaaaagatggtaatatgattcacatgcagacattctttatttattttcatcacatgtgatgctaaacatgaactggctgcccagcgatagagccaatgattcccaggaggttagcaaagggagaacattccgcagtagacaggcttgcagaagacgtgttaaaaagaaaaataatacaagctcaagggacttggaaaggtggttcgttcctgccacaacatcgcaaagaaaaagcaggaagtgagtcaccctagatacaccaaaggccacccatgtgacatatcaggagaagcaaaggacttatgttttagagaattccaagatatgctgcacactgatctgtaagtttcagactctgacaggtagatgtcaggtagagaattccaagctgtagcgtagattgcagtgcacctgacttgtgcctcctccaaccctcatattcaacatttcaacattttaagttgccttcaacatcacatggtatctcagtgaccaagggatatggggtattttataactctccaaaacataaaaacagatgccacatgaaatgggcaatgtatttggtaaaatacaaggagtgcttcagcttgctttgttagagcataaaaagcacatatgataatcaaatacaaagacacagacaggaggatggaggttgccagtggttgtggggaagtgaatatagagagatattggccaaagggtacaaaattttagtaagagaatgaatacattccggagatctaatatagaacagtgtgactgaatttaatattctcttgctaagagagctgaccttaagtgttgtaaccataaaaaaattattaaaaatggtcactatgtgtggtgatgaatatgttacttagcttgatcatggtgatgtacatgcgtacatgattcacaatgcatatcaaatatcaaattgtacaagttatatacaatgttacttgtcaattatatatcaatagagctggaataaagtatatttttatctaatagaaactaacccaaaaagcagactatgtgcactagagcatgtggtcatctcctaggagacaaagtctgtgtctggtgatctgacctttgcagctttttcttttcaccaggggagcttcgactaggtccataaggaaatatcatcttgatgtgtgcactggggctcatctttctcatcctacacgttccgtattagaaatatgtggaacagttctgatgagacactaccacttcaatttgtttttctcgtacatctcctgtagcatatggccctggtcaactcaataactaatttttaaggcttatttacttttaaatactgccaagagaagtgttttaaaaattataataagtattttcatatatacaataaattctagtaaagccattgccaataataccacaagcactgtggttgtgaaattgtgaatgtatacaaataggtgtgtgtatgtgcgtgtgcgcacacacatactctggcttaacacggtataccagcacctcgagtaaaaggcctattcaaaaacacactgatcattagcaactgagaaatgccttgttaatctgctttttcatatattttcagatttctctgtaaccgtctccatggagactttcctctgttttcccaaaggtgcctctgacacaatcatctttacacgtgttcattcaattgttcattctgtcatgtgtctagtttaacaaaacatttcagacgtggccttcaaatcagctttacatctttcaggtttggtacattatttttcatactcccatacgctcaagctcagagagtacctactatcttctgttgagcaaaggcaggaatattttaaaactgaactgctcaaagatgcattcttttacaaatgtctacctctatctctcaatctattttttcattttcataaaaatgattgtcagaaatatatataaataaataggtatataagaatataaatatatacatatataagtatatatatgacaatgactcgctgggttatgagttacactaccgctatgctcaaaggaaggtttgtttaaaagcactcaagaattgaatcaataaacacaaagatattaaaaatgtttcctaaaaataaaaaggcatatccatcattgagcaaaagaatataaaagttgccattcacatttcaccgttgtagataaaaacatgtttaccagcaagaaatatacattagcatatgatatatagcagctgatctttaaaaaggatctttgagaacctttaaaaatatttacctagcgataaggacaactcaaatacgtcatggacaagaacaggcactatgcaacaggttgtggtcagctggtctctgttccaatgtgcaaagattaaggaattttcggactgaagaaaacaaatggctagccaatgtttcattctttctaaggcagcatcacaccataacatcaagctcagaattctgtgattaagtcagtctgtggttggggcttagaaagaggagaaatgatggggcagccaaggggagctaaacctgtcagtaatttcggattcaagaagcagaaaacagtggaaacagatttccacttacatgcaagacatcgcattgatgaccaacgctaacatatattagcagctattgcggtttggaggtgaaatggacatgaaaattagataggaacttatgctttctatgaggattaacgatgtttgaacaccctagaaggtaacatataaatcttttccttgcttggtttccaattttgttatttttgacatgtaattatacacacttatgcaatagagtattttcatacatggatacaatgtatagtgatcaaatcaggataaagaagagaaaaaatagataactggaattacatcaaactacaaagcttttatatagcaaaggaaacagtgacaaagtgaagagacaacatgcagaatgggggaaatatatgcaaatcactcatcggacaaagcactaatatctaaaatatatgaggaaatcacagaaaacaaaaacaaaaagtaccaaaataattactgaaacacggttcaaatgactggaagagacctttctcaagatatgaaatggccatgtaatttttttaaaaaggctcaacgtcatgaattatcaagaaaatgcaaatcagaactataatgtgctatcatctcaaccccgttaaaatgctaattcttccacaaaaccagtctgtgccttcacagggaggtcatcccgagcagcgacctacattggagtgttctgaggttacatgcactgacaggcagacaggtgatgagtctgtgtattcagtcaagacgtaacaagggaggggcttttcttcctcagtgttttcaaactacgctcttcatactgactagatatcatttggaatttcagtagttcacattagtataaaataacggaatattacattcttattatcatatccagattgttcatggtccatgtgctggcatgtgtgaatacgaaagtactacaactagaaatcttcagcattagaaaggacctggaggtttttctactccaaactctccatgctggtcaactatggttaacaatcaaatatggcctgctaatttatctggacagctcatttgctaagaatgatttttatattttgaaatgactaaatatacatccaaagaataataatatttcatagcacatgaaagatacacataatttaaatttcagtgaccataaatccagttttactggaaagcagccatgcccatctatttccatacgatctgcggctgcttacctgaccccacagccgagttgaacagttacatcagggagtatgacccacacagtatctggccctttaaagcaaggcttgccgatccttgatataatccatccctgctctgatagcctcatgacattattgtctaaactgaattaaaatccagttacagaaaactttcagtctttgggcttgagcgtgcttttcgttattgttcttgactgatttcatttcaatcttcagcaggaatcaaatttaaaagaaaaaaatggtaagtgaaatcttcattgcaattttgaattttttttctaatttgcctcgtatgagtgctagtcagaaatgtcgtattatttataattatattttagatataaaaataaattaacagaattcttatcaaaattcaaaggagacaagtcagtggtaagctctggatacaatgtcccgctgtagaaatccaaggggattgagactgagggcctgaggccatctccacctctctcaacatgtcattctggctggattgtaaaacctggctggacctcaatcttttcctcaaatactaatttgaaagtgagtttagttaggtaacattcaactctcttgtaatggagggtgcttgtggctgaggacaagggctccaggatacttaaagttttcattttattatttcctctaattatctagaccagagacacctttgaccatttttctcctattctttgacccctcagaagttactttttctccaaggcaggaaagatgaatgattttagcacttggtgtgacaactgggatcggtgttcaagttttagctttactcctaacttattaatcttgagttagaaatacttggaaattacatcatgcttaaaatgaaacagacatccacgatttggggtaatctcaccttggccctctctaaacagcagcagcagcaactataaaattattcagtctatagcataggacaaaactacataatataatcgatactctctgctctttgatttcttgggacatctaagacattatcatttaaaataggtaacattacttaaatattttagccaaacacacacaagagcttataccacatctatgaagaagaaggaaattgcaagactaaaggagactaaattataatttaccaatgacattacaggataaggctgtctcaacagaaatacttccctgttgcctattattaaagttcgccaaagagaatgtagatattggccatctgctctgagtcttctagtgcaaaagcaatgaaaggaggagtgtaatttcacatcagtatgcaattgcaatgactcctattactacaaacatcccttctatctcctgtagcacgtaactcaattctgagtgcctagcaagcatgtattgccaagttgtattggataaagttttagtaactctaaataaaatctataatcacttaaacagatattatatcttctctcgttcaaagaaacaaaaaaaaacagatcagaggtaatttccaaagttaatccatgataagaaaaaaataaaaagttaaataaacaaggataaaataggagcacaaaaataaaatggaggcacagaagaatttatacacgggaagcactacactggcaaacatgcgtcacttattttactatatgcataaagaggaaaaaaacagattagttacaacatactccaaaatacaccaggcaaaaacaaaccagtggcccaggaaaagtgaatgcttggctaactaccagttagaagtattaaagagagaagaccttttcggtttttaaaacatatttactgcatatgatctctggatatggcattgtgctgggaaaatgtatataagaaattcacaatgcatactaagtgctcttgactatctcttcatgtctaaggggaaggtagatataaccaggagcaaaggcatgttctgtggatgcctttgtaagagtgtgaggccacagcagcgaagtcatggaatccacccaagtgtactacgctacaagtgtttaaagaacgttgcaggtcacagaactgtaagtgattctgtatttttaaaaatcagaatattaggcctttctgatcatttgctgaagtatcttcatatttctttccacaaaaaggtagcttaataagttgtatctgcaaagattttgagagttgtatcacaaataaaagtgtgtgtgtgcacatgtgtgcatctgtgtgtgtgtatgcatgtgtgtgtgcgtgggtgtgttgggggtgggggagggaggggagagggggagagggagggggagagagagagagagagagagactcttttgcgtacatatccgcttaagtgaattttataccaggagaatttgatcttcgtctttaggaagaccgtgagttaaaattgtagaaaataaactacgaatgtgactttctttcaatcccttaacccatttattcttccaagacccagttaaatcaataagcttttaaggtacgaacatgctcttagttcatctacatgtctgttgctctgattgagtcataagcctttctccctgtgatatcacagctattgttccttaaccagacagtgccctcagaatactcttgaattgcaccatatgcaaaaacaggacaaactgaaaaattgaaaatccaactgtccacacaagccgaaatcttacattcttgctaatttagttagaaattattaacatgactcatgaaatgctcaaattacaaaatgagctgaagtttgaagataagtaaaattcagtctgaatccgaatacagagcttgcatatgtgcttttggtgtaatttcatcagagaactaagtgaagattttaatcagaatgactataagaagggcttgtttgctaattgtcttgtggtatttggtacagaccagtggttttcaaaaacaatttttgcagcagtggaaagctatttttctacactctaagacctccacagaattgagtataagatgtaggtgttatcgtattttacatttttcttaaagcatccttttgtggtaggcagaggaaatattatcacctctactttaatgatagagaaaagtcagatttacaactagtgatatgtctcaggttatataggtagaaaatggagagctctatctagaatctaccttctttttccctttcaacagcctttctactctataccatgcttttttatattaggtgacatagaaggcttcaacatttagcaaccaaattgtcttagaaagctgttacgtctccctgaaatttcacaattgcataccttcataatatttggctaaatggtaaattttgaaatgtggccaatttctatcatacctataaatacaatcatcagttacaagatcatttatttgacatttttcaaatgcccaaatgaatctttcctccattaagatatttatttgtctcaattgcttaaaattaaaatatgatatgaccttttttttttttttttaagtttaggttactttttaactatgtaatgttacctttaagaaaagacagggagccaaaatatattagcaaaaaggttgtgctatgacctttatactgccaaactttaacaaaacaaatgtatgctgtagacttaagggatccaaagtaatagctttggtccctgagccctggaatcttgtcttttccttgactaaagaggcttagttttagcttatttcaaataagaatctctcagccctgaaacatgacttatgagccaccactggctgctacgtcagattcatcccaaacttcagtccaaatcatcaaatcttgatggtccttattgttacaagccttctcttctttttgctgtacaattgcaaggctctgtcaagcgtccaggcacctgcctgaagcctaagtctcaacaactggaagcctcactctaggggacgccaactgcaggtgactgtgctgtctacttgaggtctaacaggctgacacacctgaggggcacacaaactgtgaaccaagaaatggagaaaaatcaaaatagtgttataaatgaaatgcacagctatgatatgctctgatttactatatctcatcaaccaaccttgattcaccaaaccacatgatactctttgcctgctacaaaccacacataaaggtaagatcaccgcagcagtgagctctcagcctgaaggaggtaggaatggaggctaatgtcctgattccacatttattcaattaacacttccacgcttacaatgagaaaaagcagaacaaaactgacctgggcaatgggctagagaattgcgagttgactcatgaaatttactagaacaaaggtgtatttttcatcactgatgtcaaggttgtccacttctcctgctgaccaaaagtcacatttgctcttctctaaatccagtggcagctgattgaatttaagtaggttatttttaaattcccagcatctagttactttagcaagatgactttgctttccttagctgtggagacactatctgccagtggctctagttccggtggatggaggggaaaggatgtgcattctaaggtgggccgtgcttacaggaccgccttccttgacacatacttgctttctgcaagtcatcgtttaaagcttcttttaataattttgcctctctgcttaatcgaaattaaagttctgtcttggctacctctatcaaagaacaaatctgcctggctcagaccagtaattccagaacttcaggagtctgaagccagaggatcgcctgagcccaggggttcgagaccagtccgggcaacatagcaaggtcccatctctaaaaaaaaaaaaaattagggaaagaacaaatgacttctaggagttaataaaatgtaccaagtttcacctgatacctaaagctccatctacatcctgtctttctaagaagtaaacattagaacgtatctttcctaacaagagatttttcaatgctaaatgtttctccagctatataaaaacattcaatgaaaatttgaggcatctccttattcgtcttgttctcctctcttctcgtctcatagcccatgctggctgttataccaagtaaggtaagaagagttacttaaaataatgtctaaaaagcagagttccatagctattactgtgccaaatttatagattaggaagaaaattgacagaacttaaattgtgagattcatggaggtagaaagtggccggtcagtttggctttaaaatgcatgttttatgcaaaaatcctgaaagagacttcaacttgttgtgggagtgagaaaggagatgagggaggtttataggaaaggcttcccaggcaagatgtcttccaagaggagacttgaatccttaggaggaattagccagacatggaaaagaaaaaggccttctaggttgagcaagacccacttgagaagatgtgaaattgccacttattttgtgcacttggaatccagcatctcaaaaggagcagagcaacacaccaggccaaggagatgtccaggaccctggtcattatatacgacaggacttgtatgtggattacgcactacagaaaccaaactgtagaaacactgacattcaaggtaacattgcctttatgctatttttttttttttttcagaaaaaaaaatgagtggcttgaaacacgggtatggaattgactaatgcaatgctgatcgtttaagttcattgtgtcccagtgtggtctacaattattcagtgttagccactctccttctactgctggaatactttgtaaattagagaatgaggtggactggcctgtggccccaactcagaatatcatttttatattaagtccacttaggttctcattgcctgggatgaataagcaagccccacttagagctaatgcaattgtaagcaccaacataaggttctaaatggaaatgaactcacctgctcatgagggttcttccaggtgatttagaaaatagaactatctatgccatcataaaaattaaaattcaacatttagaatgttctcagataattcacaaacagcaataaatatgtctgtagatccacagaaaatgagaacaccagtataaatatttccttttcaactcaaaaaaatctttaaagaatagaaagtggaaatattctccagaacatattttcagtgaatcaagtttgaagaaacatgaaattttccagttgcaaaagaatgcagacatcatctatgtcatcctttcattttccatgtaacttcattttgcaagtagctaagtttgagaaaagtcatttgccccgagtgacaccgaggagcttaacagcatactatttcccctatgaaggtcatttataaaaacgtatgcattttaagttttactttcaagaacacaaataagaaccctctgttctgagatttaagagtcatttgatggaaaccatggcagacaaatctactgttggaatgtggacatggctgttgccgtccatttcaagatggttcaaacgaactcaaacaagattggacctgtttctctttgttttgtattgatcgtcagccataattacctcagaaaatgacactagaaagatttaggcaaaatatttataagtaaatacgagcttgtagggctaattatggtaaattctaccaagcctttgaatgcaacattaaaatgactaattatttcctctggatactatttcctgagtcttaatatattagattgtagaaagagtaaaatcagatattgtcaacttcacttattttttacctgaagtaatataacattcggtttatgttctctgatatggtttggctgtgtccccacacaactgtcaccttgaattgtaataatccccacgtgtcaagtgtggagccaggtggagacaagtgaatcatgacgacggtttcccccagactgttcttctggtagtaagtctcaggagatctgatggttttataaaggggagtttccttcacaagctctcttccctgccaccatgtaagatgtgactttgctcctcctttgccttccaccatgattgtgaggcctccccagccgtgtggaactgtgagtccactaaacctctttcctttataaattacctattctcgagtatgtctttattagcagtgtgagaaaagaataatacattctttaattaaaattggtcaaatgaatccactgcatatgatctcaatataaaaatcagacctttcctaggaaatatactagatcacgaataaagcccaaagtagcatatcctgaagcacatgcataaggcaactaaagagcagagtcacgcccaacgggacaggctaaaccttctcaatctgcctttactcatttctctcagaattcacaatcaggcataagaaaaatcttctttgtgaaccacagtttttgttggggttcatggagatttctttttttgcccttcacacatttgatttacttatttgctggcttataaatggctcgatcattaaaaccagtgttcttctctcctcagtgacccgcacttaattatggctcatctggtttacagcaatagtgccagggaaaagagcatgttcagcaagctgtttttacacaatgttcatttgaggtatattagggaacttcatcagccctctatgatgatatattgtttcactttttcctaacacctgcgtggttgttcagcacattcttcaggctttttcctctccataccagtgtctatgcagctatatatcatttcagaaatctgcatggcaatattgcttccatattctcgttaacttgcccaagaacgcgcctgaaagtaaattttaaaaatttaaatgtaaaaattatagcatattcccaaacaacatgtccacaagcacatcttcagagattaccaccctgagccttccgatatttccaccttaccaacaacattgtagatcacggtgttattttatgacaaagtaaccaagttactcagtattattaaggcgatgaaacatttcaactgtataatctcttttgaggttgggaaaccattctaatattcacaaacctggtcatttcgtaactattaaaatacaccgttccccaacagaactgaaatagcatgctaggagagaacaccaaacatctgcgttagctaaaattataatacatggggtggaatgtcagagagaaaatcagagtcatgaatgtttaatcacttgatgttgtggaaaagctggtggctgcattagcactaaacatagatggcagacttcaccgtgactcaaccttaccaccttctccttgaacgtataagaacgtgtctactcaaaaaataaacacatgaacatctatgcagaatttaaaatttttgtaacatttgtatattgtcaccgtgtatatttttgaaacacttgtatttataatgtaagtgatgcaggtgtttgaattccttttatagatttcccccctcccagaaaaatgaaagcaaaaagtttatcaaacttagtattatacctggtttctgagctctcactagagggcaggtaaatgaggaaaatgtagtgtgtgtgtgtgtgtgtgtgtgtgtgtgtgtgtgtgtgtgtgttaaatatttgagtattttcaggttgaaagaaaccaccgaattccacccaaacccatgtttagatcttttgtggccaggcacggtggctcacgcctgtaatcccagcactttgggaggccgaggcgggcggatgacgaggtcaggagatcgagaccatcctggctaacatggtgaaaccccgtctctactaaaaagacaaaaaattagccgggcgtggtggcgggcgcctgcagtcccagctactcaggaggctgaggcaggagaatggcgtgaacctgggaggcggagcttgcaatgatccgagatcgcgccactgcactccagcctgggtaagaaactccatttcaaataaataaataaatataccttttgtggacacaggaacaaaccacttcatacacacacacacacacacgcacacacacacacgtatatatgatatatatacacacacacaaaactctacaaaaatgacgcgttaagagtgttcttaacagaagtagcgaattcaggtatcttctttatgtgtttgcatgtaggaaagcataaatagctcaaactcatttttattaaaagtagagtgaatgaaagggaacattcagtagtttagtaaaggaagttctccttcagtacataagtgaagaaataacaactgcaacaaaacttggtgagggaccagagtgttcagacagaagaataactgagttaaatattgcttacagaaatcattcaagaaaagcaagcatgctataaaacctccaaagcctacagagtttcctaccaatcccactccaagttaagggtccagcaatgcatctttattcattttccccctgcatgaagctctgtttctccagtgtcattcatgggtaacatgtgctactaacctggctgctgtttggaagtgaagatttctagattccaggccgaaagtagaggagctttggaggatgggaaccaggccttgccatttaaacagcgcaggtgagtctcatgatttgaatcagctgtttttttgttttgttttgtttgtagaattgcatttttttatggatgttctttcttattttttcatgatattggggtacatgtggcatttggttacttaagttactggtgtttgggagatcctggtgcactcatcacctgagcagtgtacactgcaccatatatgttgtcttttatccctcacacacctcctagtcttcccctcaagttcccaaagtccattgtatctttcttatgcctttgcatccttatagcttaactgccacaaatcagtgggaagatacaatgtttggttttccattcctgagttacttcacttagaacaattgtctccaatctcatcccggtcactgcaaatgctgttcattcattcattccttattatggctaagtagtattcatcatatgtaatacacacacacacacacacaccagtttctttatccacttgttgatttatggacatttgggttggttctacgattttgcaattgtcaattgtgctactataaacatgcatgtacaagtatccttttcgtgtaatgacttcttttcctctgagtagatacctgggagtgggattgctggatcaaatgttgttcttttgttgaagtcttagagtattttaaatatgtttcattttaaatgtctgtttcagtccatttttacctctatcctgtaagcatcttggctgttttcactgtgtctgctttattctggtcctgcgaaggtagttcacatacacctgttagtgagggcttctttccatgtgttttgtccttctcaccgtgctctccaatggagaggtacagtgagggcaccttctccggccgtgaatgactggaaccgagttcttctctcaaagcagtcttgcaggcccagcccctgaccgacttgacaatggcgcacattcctagttgttcagctatctctgccctttcctctaaaatctagaggctgaaactataatgaatttagccctttaaatctgaataaacatattactttttaaatgtcaatatgtgaaatataatagcaactgaaagactttgcagctatgtgaatatgtgaatatatgaagataaacgaatttcaattgctataaaattcttacattgtatgcagttattaaaatgtatctttactgaaggaagaataatatgaataatactgtgttatgtattacaactctgaattggtcatcaaaaccccaattcactttggtatatgatctcaaataaaatatggtacgcaaatgctcacacatgtagtgtgttcttaagtagctaagggttttcagttgaaagagcctcttacgtgctagaattagaggttcagggactaaaaagtaaccttatagatctcatctggccattgtgctttctcacatttcctcctgatatcatgcctgttgcgtaagctattcacaacaggatcgtagagctgagcccactgtatttcatcaaataatttaaatatcaaatatttactccaaggccagaaatattaagagtttatattttatcacctccaagatacttctctcctaccatcgccctcaccaacatggcattactttatccacagttcctctgcactaccatctctaagtaagttggaaatgcacagttggaaaaaaaaaatctgtcattctccatggtctgcttagtattagtcctttaggatacaaataaatagcatgcttaaataaatacaatatctacaggtttcctataactttaaagttttcttcatggtaggacttcaaaaacttaacaaataatcagaattaatttgagatcaagagatactcaagccaaaattttaaaggtatattgtaaaagaaaaatgaaaagaataaggaggatggggagacagaggaggagaaataccaaaatagtattacaaaatttaaaagtgtgagtaatatcacttaaaatttatcatattttaatgctaaaatcatagacgtataattgtagtatttataaaaaatagagaatatacttaattaaaagcccattgctagtggtgtaatgcctgaatgagactcagtttaagatgtataataaacatctccctccccttcccatggaacttctgtcctgaggaatacacagtagctgctgctgatttacatgtatacttacgtatatatgtatatatgtatacatacatatgctatgatcagccaatttaatttattctcaaaatttattctcaaaatttccatgcatgcaaaattatgatgacgttcactttattcagggatgaatgtcttctggggtgttataattttatgtaccaaatgaatgtcactgtggggcttgttgaacttttgctttaccagtgggtgtggagcgcggccatgggccagatccagctggtgccatctgacagctgcctagttttgtaaggcccatgagcttagaatgattttacactttttaatggttgaaaagaaaaagaaggggactgtttcgtgacacgtgaaaatatatgaaattcaaatttcagtgtccacacagtcggcctggggggagctgccactggctcctttccacaaggtgtatgtctccttttgcgataccagcagagctccgcagatgcagaggtgacgatatggcctacaaaacttaaaatatttactatctggccatttaaagaaaaagtgtgctgaaagtaatagtctaacagggtataactatatcatgcaataatttatgaattccttttagtgctaacttggtattttgcatactttttctaagagtagaaaccaggtatttgtagcttaatcattaaaatatctctcaagataagtgtatatgatttcaaaaagcaattaggttgcaataaagctttgtcagccaaggcaagggtaaacaagttataaatcacgtaagagtgccttggtttcagtgctcaaataacttttaaacacggttttaccaataatcaccataaacctaaaactacaggacagtgaacctttattaaaaaaactgaataattagtacattcagtactacacttccagagtcttgtgcacacacacacacacacatttaagttgacatatataggcatataatatatacatatatgcctatatatgtggcaaaatcaatatacatgtgatacgaatgaagtattccagttacacatagtatattaataaatgcaggaatactagggtagaaatttagaaggcagagttgtagcccagttcggtcactaataagttacttggttatcagcaatttcacaaaagtcccagagcatgagttgcattatctgtagagaggggtgtccctccttctgagattacttcactcttcaagaatatttaattcaatagatatattctgtgtatatatggctgcagtgcattattgtgcaggggccaaataggtacaacatatctaaacactataattatctacagaaattatcaatagggtttaaactcacaataacatattaactagagaagctttgtttttcttcctattttctcgagcaatttaaagctaagccattctttaaaaacaagattgaatccttcctctttgtctcttatagacttccccaaccttgcaaatagagatgtctccttccaatcctcttgcgcagaagagccctgtgttccttggagattacatggtgttctaaaagactgaattaactcaagagtcaatgaacctgtgtttgagtcatgctccccttgcaaatgtgtgtggttgattctgggtatgaatcctcagccctctgggttttagtgtgtttgtctatagacaggagcactgtggcctggcccacttctacattcattccaagggtccacgtcaaggagttggtaaagaacgcacaatgagtacaggctagttgcaggaacccaccatctctcctactgtcggaagcaagactcagtgcaagtccagagacaacactactaaattctaaacagcccctaccttttaaccacagtttaaaacatcaacgttcagtgaaagaatgcttccctactggagatcttccacatggttaggatgctcaattagccaaatgccactgccatcccagttgtggagttccagctctcttccctgtccccatctgagcatacagttcctctcgtctctgaccgcctgggatctcggacaagttacttaacatatctgtatgtctggtttcctctctgcaggtttggctgtgaggatgatctgagaggatgaactacacgtgagagtgactgtcaccgagtaaacgcgtggcatttgtcaccattttagggggtaacccttctcatctaatgttgatttcctgatgaacacacatctacctccctgaatttgcttttacttaatagtggtccccaaatgcatccagctccatgggaagtgcaaatcctcctcttatctgttgcatgattaacacatgcctctttaccctaattgtaagttactgcaaactccatctataaaacagtatttgtggaattaattaactgtgttttaagtcatagaagagcccgttatcataacctcttttttcttgcacatacttcctgttcctcccaggttctttgagatggagtctggctctgtcgcccaggctggagggcagtggcgcgatctcggctcactgcaagctccgcctcccaggttcacgtcattctcctgcctcagcctccagagtagctgagactacaggctgcccgccaccacacctggctaattttttttttgttttttagtggacacagggtttcaacatcttagccaggatggtctccgatctcctgacctcgtgatccgcctacctcggcctccaaaagtgctgggactacaggtgtgagccactgcacccggcccctcggggttcgtaatctcacagttcctgacacaattaatcacggagcttctggtctcctttatctatctttaatattggtaaagcactgacaggtcccctgaaagtagaattaggcttctgatagcaggtgaatttctttttaatcatttcatgggacttgaggaatacttgactgacagtagatatttgactaatatttgaagacattttaaaataaaatatttcttaaaattaatgctatattgaaaagaaaaactggatttttcgtgcccaacagatgttttgtcagttctcatgctacacactgtgtggatgctgaaatagtcactgaatctctgagctgaagctttatcatttgtagaatgggctaaattagacttattaagctgtgaggcttaaattagacaactggttttcagtggaatacctaagttactcaaaaagcaggaaggaaaaggcgtaaaagaaaatattactacttactcataaataatacaagataaagaaacttatttttaaaatattagataatgatatatctgatatctgcagtcatctgtgatttttaattgatttaatgtagcctcatgaagggctaactgtgtctcaggcactgcttctaagtaatctgaaaaactaactcattttatcttcattacagcctaataaggtcgacattattgcatttccactttacagattagaagacggaggcctgcaagatcaggtaacgaccacggtcctacaaagttaaaaagtcgtagagttcaagtttgttcctctgtgaaacgcagttgccctattttatactcccaactctctgctttgctgtcccttttgttttgtttttccttaaagaagtttcctatcagcagccaggtgcgacggcttggctcacgcctgtaatcccaacactttgggaggccgaagtgggcggatcacgaggtcaggagatcgagaccatcctggctaacacggtgaaaccccatctctactaaaaatacaaaaaactagccaggcgtggtgcggggcgcctgtactcccagctatttgggaggctaaggcagaagaattgcttgaacccgggaggcggagcttgcagtgaggcgagttcactccactgcacgccaaggccctccagcctgggcaacacagcaagactccatctcaaaataaataaataaataaataaataaagtttcctatccttagattaagaaaaagcaagacaaggattagaggtaggatacataaggaacctgtgaaaataaaggctgagataatttaattgatatacaaatgagaacagaattacaaatccaagtactttataaaaatagaattatgacagagggtaattcaatttacatgagtacagtgaagaaaaagtccattacatctgtattttccaaaggatcctgggagattttaacaaaagacttgttttttccatgagaggggatttcaaccagaacacaagcagtggactcctcctccttcaggtggactccttggccctggggttgtaactgaaccttgagaccccaagctcatctgtctgccccctgcactcatagtggtccagcagagcctggggacagagtctcaggtccgagggattagatgtaactttggacaagaagagttttgttaaaggtcccttgctgataagattacggctttcttcagagaactcttcctcatttgtctgcttaatttgtgcaatagatagaacaggatctttaatttattgtgggaagtggataatatagccccgtgaagtgtagcacaaaatagctgctcaataaacattcttttctcttttcaccagtttgctaccccctctactggcctcaagaaggaaaggacagtgaaataaaagaaattatgggatgactgataagatttgtaagagaaaaggactttctttacattgttgtgtaatcagtttttacttactgagcaatttagtttttaagttaaatttaaaaatgaaagggaattattattgtagtttgattttataatatgggatagttgttccccattggttatcagggtctctataaattcatggctcatctgagttataaaagtaatttaattaaatgtaaaagattatttcttaaactgttaggacaagtctatgtaatttaagccaaatatctaaaaactgctatcaacaaacatctcagtagcagtctttgaatagattttgaattttcagtatttacttctgctactacggaagggagaaaattgaattttctcttcagagcagccaggtcacagtggatcataatatcagagacttcatcagacactttcaacagagtaaataataggtgagagacagtttcaaacatacctaaacaggcttaaacaggaaatgccaccattttgtatttggtggatcttccatgatgaccaaggtcagtgtttctcaattttctttttccattatcaccccttaaaggagccttttcaaagtttttccctcctgcccgtcatgaaattctatactacaggtaccctgcataactgttttaggtactcgtatgtgtatgcatgtgcgtgcatgctttatacgtaagagggataaaaaaatgttctggcctccaggattttattcctgctcccctcatttagggtctttccagctctatcttccccaccaccccctctctggaggaggaaaagcatacttttattgtttgcaaagctaagaaagaagagcaataactccctccctactacagattgtaggaaacaggagcgccatctgcctggaggacccatttcaaagagacaacatcaacgtccctgggaaggacggtgccaggacatacaactggcaggcagcctttaaaaagcattacatcgctctgtgcctggttatttcacttaacaaagtgacttctagttccacccatgttgttgcaaaagacaggatctcatttttcatggctgaatagtactccactatgtatatgtatctcattttctttataaattcatcacatgttctcacttatttgtgggatctgaaaatcaaaacaatagaactcatggacatagagagtaaaggacggttaccagagtctagaaagggtgtagggcaggggggagatgaaaatggttaacaagtacaaaaaagaaagaatgagtaagacctactttttgctagcataacaggttgactgactgtagtcaataatttaattgtacttatttcaataactaagactataattgaattgtctgtaacagaaaagttaagtgcttgagggaatagctaccccattccccatcatgtctttattatgcattgcatgcctgtatcaaaatctctcttgtacttcataaatatatatacctactaaatgcccacaaaaatttaaaaaataagttattgtaaaaataagtagttaattaacattaaaaatgctttacatctcaaaggggcagaaaggattacaactttctttaagccaaggggaacattaaggtcctcttgataagactagggcccttaaaataaagagaaatcttacctaagaaaacagctttcccctcttcagttcctgtttactgttatagcttccattattgccctagtccatacaagattcatttgtttttcatgttttttccaaagtaatctatttttagtaatacaatttcctctcttgctttctagaagactctacattgtcagttaaaacattttttaaaaagataatcaatggccgggcgcggtggctcacgcctgtaatcccagcactttgggaggccgaggcgggcggatcacgaggtcaggagatcgagaccatcccggctaaaacggtgaaaccccgtctctactaaaaatacaaaaaaattagccgggcgtagtggcgggcgcctgtagtcccagctacttgggaggctgaggcaggagaatggcgtgaacccgggaggcggagcttgcagtgagccgagatcccgccactgcactccagcctgcgcgacagagcgagactccttctcaaaaaaaaaaaaaaaaaaaaaaaaaaaaaaaaaaaaaaaaaaaaaaaagataatcaatataatacactgcctgttactaaaatcataaccaaatattgaacctaaatcaaagcacccgacaaaaacgtgcaagggatttaatatgtttaaattttactcgaaaacatttatattctaatggaactcagatgatattttatgaaatatgttctctttcaattgtgaggacattttccatattcatcagttgtaatggcaagtttacaagaaaaagtttaaatactttaagtgtgtagacatatagtgaactaatatacagcatatcatatttttattttgaatttggtagttttgctcacaataaatatttgcaccttgtctatatataaaaaaagagttttgttaatgcttaagtagtttggaatgtaattttactttcttaaagaaaaactgtaagtgtaaataaatttaggattacacctgattctgaaaactgtacaactaattgaaatgctaagattatcaaaatcatgcatcattttttcacatttctgtattttaggtgttctttttaaatgttaattttgcctaacctctggggaaaaataaaagacaacatttctttttagattgtctgttctttttctccaagtctactggccttagggcagtgctacgaatccaggcgttgtgattaaattccctgtgatatcagagacagttacttatgattgtgcctcttattgatgatatcaagcagatactctggtttctgtctttgtacttgatttgtttactctgaacactaacggtgaattttaacagttgcttcctgtggttaaaacctaaggcaaactccagcctctgatccagcctgagactttctgccacgtgctttaggctgagcttccagatttgaatagctgactccggtgaccgaatttatagtcaagtcctgattactcttggcattaccctccagaggttttgatcttttgacttttctagattccaccaaggaaacatcactaaaaatctacttaaagagtaattttcttttgatatcaaaatatttcatctttaaagttttattatttttttcttttttgaaaatgtttttaggttcagggtatccacgtacaggtttgttcatggggaaactgtgtgttgttgaggcttgatttaggaatgagcctgtcgcccaggtagtgagcacagtacctgacagatagccttccaatccatgagcctctcctaccctccccactcaggtagtacccggcacctgttgttccctactttgtgtcactgtcttcagtgtttcactcccgtttatgagaacatgcagcatttggttttctgtctctgcattgcttcacttaggataatggtcttcaactgcatccatgtagctgcaaaagacgtgattcttttttttttctgttttatggctgcatagtgtctcactttgcatatgtaccacattttctttagccagttcaccattggtgaacatcgtggctgattccacgtgtttaccattgagaatagcactgcaatgaacatatgcatgcacgtgtctttttgacagaatgatttatttccttttgggtaatcccaaaggtgggactgctggtttaaatagtagtcctgttttaagttcttcgataaaactccacagttttccacagtagcttaattaatttgcattccactcacagcatataaaaacgttacttttttttctgcaaattcaccagcatctgttgttttttttgctttttattaacagcaattttgactcatgagagatggtatctcatcgtggttttgatttgcatgtctctaatagttactgatgagcgttttttctttttcttttattttattattattattagactttaagttttagggtacatgtgaacaacgtgcacgttagttacatacatatacatgtgccatgctgctgtgctgcacccattaactcgtcatttggtttgctggctgcttgtttatcttcttttgagaagtgcctgttcatgtccttgcccatttttttaatagggttgtttttcgtttgctgatttgtctaagttccctacagattcttgatattacacctttgttggatgtgtactctgcaaatattttctcccattctggaggttgtctgcttactctgttgataacttcttttgctgtgcagaagcttcttagtttaataggtcccacttgtcaatttttatttttattgcaattgcttttagagacttattcataaattgtttaccaaggccaatgttcagaatggtatttcttaggttgttttctatgattttaattgtgttagagcttgcattgaatcctttaatccatctggagttattttttgtatgtggtgtaaggaaggggtccagtctcataagtccagccgggccagactgcatgagtctagacagttttcccagctccattttttaaatagggagtcctttccccattgtctgatattgtcaactttgtcaaagatcacgtgattgtaggtgtatggctttatttctgggtcctctctcatttttcattggtctatgtgtctatttctgtaccagtaccatgatgttttgattaatgtagtcctgcagtacagtttgaaatcgggtagtgtgatacctccagctttgttccttttgctcaggactgctttagctaatgtggggctctttgggctccatataaattttagaatggtttttctttttctaattctgtaaaaaatgacattggtactttgatattaatattgaatctgtaaattgctttgggtggtatgatgattttcacaatattgagtcttcctgaccatgagcactgaatggttttcatctgtttctgtcatctctgatttctttcagcagtgttttgtaattcttgctgtggaaatatttttcattgttggtaagttatatccctaggtattttattctttgtgctatttttaaataggattgtgttcttaattcggctttgagcttcgatagggtatagaaatgctactaattttcgtacattattttgtatcctgaaacattactgaagttgtttatcagttctagaagccttctggcaggctttatggggtgttctaggtatagagttacattgtcagtgaagtgagacaccttttcttggctgattgctctggctagaacttccagtactatgttgaatagtggtcaaagtgcgcatccttgtctcattcctgttctcaaggggagtgcttctagctttttctcattcagtatggtgttcatagatgatcatttttttgagatatattccttcaatgcctaatttgttgagggtttttaacatgaatgtgtgctgaatttatcagaggcattttctgtgtctactgagatgatcttgtggcttttttgttctgtgtatatggtgaatcacatttattgatatgtgtatgttaaaccaactttagatcacaggtatacagcctactttattgtggtgaattagctttttcatctgctgctggattcagtttgctggtattttctacgttcatcaggaatatttgccagaagattcatttttctgttgtgtctctaccagggttttaatatcagaatgatgctggtttcataaagtgacttagagagaagtccctctttctcaaatttttgggaatcattttagtaagataggtactagctcttttttgtacatctggtaaaattcggctttgaatacatttggtccaggacttttggttggtaggctttttattaccgattcaattttggaacttattggtctgttcaggattttaatttcttcctggcttaatatgagatgttgtgtatttctaggaatttatctagtctcctaggttttctagtttgtgtatacagaggtgctcataatactctcaggattttttgtatttctgttggataggttgtaatgtcagctttgtcatttctaagtgtctttatttgggtcttcttaaaattaatctatctcacagtctatcaatcttatttaatccttcaaatcatcaacttttggttttattgatctcttatatggattttagcagttcaatttcattcagttcagctctgattttggttattttctgctatgtttggggatggtttgctctggtttttctagttcctctaggtttgatgttaggttgctaatttaagatctttttgacttcttgatatagacattaagtgctaaaaactttcctcttaacactgatttagctgtttcccagagattctggtattttgtgtctccattttcactggtttcaaaaactttttttgatttctgacttaatttcattctttacctaaaagtcatttggtgtcaagttcaacttccatgtaattgtatggctctgatgggtctttctgatacgacttcatttttgtttgtgctgttttatttgtggttgttatgaattgaatttttttttaaatttattgagacttgctttaaggccaagcatgtggttgatcttagactgtgtgccatgtgcaggtaagaagaaagtatattctatcactgttgggtggagtgttttatagatgtctctgacgtataattagtcaagtgtcaaggttaagttcaaaatatctgttagttttctgccacaatgatttgtctaacaccgtcagtgcagtattgaagtctcccagtattattgagtggttgtctaagtctgtctgtagatctctatgaacttgttttatgactatgagtgctcccacgttgagtgacttaactacttaaaatagttgtcttcttgttgagttgagccctttatcattacgtaatgcccttgtctttttttattgttgttggtttaaagatcgttttctctaatatagaattagctactcctgtttgttcattttctgtttgcctgatagatctttatccatccctttacttcgagactatgggtgttgttacttgtaagacgagtatctggaagacagcagagagttgggtcttgcttctttacccaactttccatttgggtaaaatgtattttatgcatttaaagttagacatttaacccatttacattctgggtcaatactgacacgtgagaattgtatctatcatcttgctgtaagctggttcttatgtagacttagttgtatagttgatttataatgtcaatgaggtatgtgcttcagtgtgtttttcggtggtagtcattctttcatttccatatttagcatgccttttagatagtctggtaaggcaggtcgagtttcaacaaattaccttagctttggctttcctgaaaagaatttcatttctcctttgcttatgaaggttagtttggtgagatacgaaattcttgtttggaattactttttaaggatattcaatacaggctcccagtctttcccagtttgtaaggtttgtgctgaaatgtctgctgttagcctgatgggggtccctttgtaagtgacctgctccttctctctagctgctttcaagattttttctttctcacagaccttggaaaatctgatgatattgtcttggaaagggtcatcttgtataatatctcatggagattctctgaatttcttgcatttgcatggcaactgtcctaatgggactggaaggatttccatggactatatgttcaaatgtgtttctcaagtttcttgctctctttctcttgctggaataacaatgagttgtgtttggtctctttgcataatctcatatttttggaagttttgtccatttttaaaaattcatttttaatttttgtatgctcacgttgcttcaaaggagtggtgttcaagacctgagattctttcctcagctcggtctgttatacagttaatgtcaccagttgtgtttcgaaattcctgtggcaaatttaattcacaagatccagtttggttctttcttaaaatggttatgttggcttccaactcttagatcattttattgttttccttggattctgtttcaacctcctcttgtatcttgatgagctccattgccatccagattctgaagtctatgtctgacacacttcagccatttcagtctggtttgaatccattgctggcgagctagtgtgattgtttggaggcaagaagacacactgacctttagtgttactagggtcttggagtggttcattctcttttgtgaaggctaatcatcatttccctttgaagttactgttctttagatggggcattttgtttttatggtctttattgcccttgagagtttcacagtagaacaagttgggtatagctgaatgactttatttctggatactttaggggtcaaggctcagctccacactgctgggctacatgctctcaccgtgggggattaggaccaggtcagcagtttggcttctagtcccttgaggatgcgcctctgctgggctggagaggccaagatactcacagactactggcaacaggcaagttaaagttttaaatgcagggttttgagagaaacttcctgttatattttgtattaaacatatttttattctgtttaattcaagtaagcattaggtttttaaggaggaaatggagcagagggcatgtctggggatagaaaatataataaacctaaggcttcaatattagatatgggatattcccttatgcaaagagacaatatcgttataaattttttaaagcaatgtattattttttcattcatggattcaaaatgctgatttctctgcttcataaaaattcatcttactgcacaaattcacttattttctttcttacgtcttaaagttcttatatcttaaagttagtagaatgttagctatataatcattactttgtatgtatgtatgtttttatgtatttttcaaacgcctaaggtctttacggttacataatagacaaatattgttttttaattcatgttgttggactgccaagcaattgtagtggaggaacagggtcaagtaaactgaattgatcaaaataaatatttacgattgtggactgtggaggccatgcaagttaagaagggaagtgtggatttcacaagagtaatgatgacgaaaagtggtagctccgctaatataaactcattgccgtgatggaaatgttatgactgaagacataagagttcaaaggttcagcacgatatagctacaggtcatggcaaggtctggggtgaacatggcagtaggtggctgaggtggaagaaaagccctttctatctcagtgcaaagtccatttactgaatattagcatttttctatgtgcatttctctaaccttctacttgtccaaaaagagatatttttttgtcagtattagccattaaggtataagctaaagcaggaaaaagtaaaactttatatgaagtaaagatacataacgtcggctctccatttcattttattaagtctgtgggttaaatgacatcatgagaacagactgtggtagcattaaaagtgaaggaggaacgcttagtgtttccttccacatgctgttttccattgctgctgtcaaaaggtaatcatttcatctgtatttgacatatatttttgtataccatgaattagtgaactcaattcaagggcaatagttaagtgtcacttaaaacaacaacaacaaaaaacagaaaaaaagtcctctaatacctcatccaataaaatgattcaaagccttttggaggaatggctgtttctaggtttgaggtacacttaaaacaaggtgagcgtttttactgtcagaaagtaaggaagtgttaaaaaaaaaaaaaaaaatcacaaacaaaaagccacattgatgcaggcctgtcaaaggactcaatagctaactgaaagagttctcactgtccaaacctagaaaatggaggcaaaagaaaaaaaaaaagtagcattggataacccaaagtgtacaataaatatacttgagtgcatactgataaaaataaaataggaagaaagcccaatttccagtgcagaagactacaaaattatttacatggaaatatagccctcaagaaggcaaagtgtaactccccatcccttaagcatgagtagcacatagtgatttgcttccgaagagtgcagtgtggcaagaggaaaatataaagtgacttcacactggacagccctcagctagcatcagcagtgatgattcgggctcacagtgtataaccctgatttgatgtgatgagaagacagtttacctgtgtggtctgtctcccaaaaccccaaactccagtctcatcatgagaaaaacatcagacacctccctagggaggagcaacccatgataccccttgaccggtgctgctccaaactgtcaaagtcatcacaaacaagaggagtctgagaaactaccccagccaagaggagcctacgaaggtatgataagtaaatgtcaagtgtgatccagggacagaaagggaacattaggtaataaccaaagaaagtatgcgacataggatttttagttaataacgtgtcactgttggtttattaactgcaacaaatgtgccaccagaatataaaatgttaacaacagaggagacagagtgtggagtatttgaaaacactgcaatatctctgaaatgttcccataaatctaaaactgtcctaaaaaagtttatttagcaaaaaactttcagaactactgcattattcctctcacttctattacgtactcaactcttatcatttaatttcatcttatttaattttcctatgtgcgatggtgattcatgaacataactgaaatttcttttctaaaaatattatggaagttatgatagtttaatgaaacgtttcactttaatttaattagaaggaaacatttctatactgtcatctttccctccggggaaggaacactgtgccatcttattatcaggttctccctggggcactttttctctttgataaatttgttatagtcgtcaaagcctggaagacagtactagccaaaggagcttttctatgtatatgtataattctttcttttgctttaacgcagaagctgttagtgaggtattaaaatgaaaatttcccctttctctctatacctagaagactttagtgtctctactgagtagacttgatatataccattaacggaaaagccagtatgaactatgacagaaattaagacagaattctcagtaaaaatacgtgatcaaattgaacttaaataatataatcaataatgaagtgtatcatatgtgaccgaagcatggttttcacacctgccattttattgacccatcagctggataagtacgtccttaccctccccttttagatcccccctctgagttccagtccagggttagctttgaggaaggattaacagcagtccccacaacatcatcaccatcactaacgtgtgagttaattttttttaatacagcctacctactgttatgctgtattagagtacaatataattacagtacaatgtaatctttttctttattttcagaatctgattataggtgtcaggggatatcagtaataataaaaagaaagtcataggggctgaaggcacctgaaaaaactttttgtagaaggaatggaactttatctgtcctacggagtgaaaggaagacagcttgctactggcaggagtgaggagagaatgcccacagcagatctagagagaagaggctggtcagtcccactcaagcgactcacactgtccaggaatgagccatgggaagacaagggaagcagctaagaaatggtcctgaaagccaggagcatgaagttgttttttagctggatgttttctgagtagacggctagattataaaggtggcatttaggaaaataagcagctgcatccgtgtctggagcagactaagcatgagcagcagagacgtccaagtggttcttgtctaatgaatggccacctgctctaggatggcccaggagaggatggcaggaaaacggcctgctgagcaaagtctagagtgaatttaaagaacctaggggctaattaaacacaggacatgaagctgaagaagagccaatgatctgttccaggtttctaatcagagtcttagaaaacaatgattaaacagacaaaggtggggtggggggggggggcgatagtgggggtacgggcaaggagcaatagtggggacagggcagggagctagagcaatttgtgaagattaagaggctgttataggtagaaaaggagtgatgaatatttccaggcatgttcattggcagacctgaagaacgaagtcaaaaatggcaactgtagataggtgaaaatacagtgttagggtaaaataacgaaagcaagaaatatggagtgttttcaagtctttgcccacggggatagatagtttggatggtcttagaatacataaaacatgcagttgtccataaacagacttcaggaaaagacacaaaaaagtgtcatatctccaaaagcacctttcttcctggtctgtcaggagggtgatcatcctattcaccatccacacaggggcacttttgagaggaaaacagggcattatattttggaataatgagcacaagcatcttgtactaccccaggaaaccagagctgtcctcacccgtttgtagttttacagtccatcttatggagtctccttgatgggcaagtgacatcagaagaatttttttttcctccttaacattttagcccacttcttactaacattagcatttcaactgaagactcctactgaggaagaaggctcactggctaacagccacgtggaattgtggctgtgggatggtcgcggctggtggaaggataagggaggaatgcccacagagtgagaggggtaattaaaggtctgcatgactgttttcttcctcctcacttcccgactgcctgcaccatgccctgccctgtctttgtacagtgatttccccctcttcaaaccatcctcatacattttttaagagttcaatgtttttaagccaaaacagacttcacagtcatctaaataaaagatgtacacaactcccatcaaacacaggcaaatgccttcaggatacggccaccacctcctgctcttagatgtgcagagagtttcctggcaacctccaggccttgccaatgctgcttatcccactgtttctgagagcagccaagggattgtctatggtggaaaatgcccgtctttaagtcttgatatctatactgaagctagagaagaaaatttccataatttaatatatcataactaagtaggactcagcttatcaaaagatatggaaatgcactgcaaactttatgctctaacatcaagtgtgcttaacaactgtatcaaaagaatttattttctgctggctctgtttgtcaataatcgtttttgacgttttcctatttgacaatactgatagcattttctctgatggtaagaatgacctgtggccattgtagaaaatttagaaagtcaggacattttcaagaagagaataaaagttacctataatctcaactcttagaaatacttactgtgagtaaccatatgtaacccgtgctgtgattctcttgtgcatatttttttctttacgtttcaaaatattttcggcttattctgtagaaacatcatttagaaagaaaacctccatttttatatgaatagaccattattttccccacagtatatttaatcaatttttaatttaattttatctcatatatttgcctgtttgttgttgttacaacattgagttagtctgacaatttttaggggggaattaaataatatttcttttcagaagggttgcattctatagccgtgctcatatcacaccgttgttaacgctgaatattaattctttaatctttgcaaactgattgcattttaacttgcactgctttattcacccagctgcaatatttttcagcctgtttgataaccaactctattttctgttgtccgacctctactttcatgttcctcacccctgtgattttgtcttatttgtaagtgcttctctgttatgcatttttacaggtatttgacttggattttgtattttggacacactactgtactgcaattttatggaacgggggtaatgttcactcctccactcaccgcacaggtgctgagcaccagcatggcagaagctgtgccccgggacacaggtacagtggcaagtgggatggcctcgtcggtttcagattgttctcctggatcattgcttctgttgctttcatacatttcattcctctttcttctaaattttcatatagagccatttctcctttatttttcatttttatgtgttttaaacagtgggattatagtgcatggaattgattacacatcttttggaagggctgagagcgcaaaagaggaaaataattaaccgagattagtaattaaacaaagcaactatcacccctgggacagagagagcaaaagggaggaggagaagtcaccacagcccaaaaccttggtcgggggaggcttagagcttactaatttggcttttaatggtttgcttccttttcttttagtcgttatatctaaactacttaaatctattcagttttcaatgcgaagtgagaggttaaattgattttttcccccttaaattactaacaagtcaatttgactatattttaaaggttctccaaagatcacttttggacccaggagaactaatatatactcaaagttgagtcagtaaaggtgctggactttgcgaagaagccaagtaaattctcaaagcctcaattttatgatgtgcaaaactagaggttcaatgaaatcatttataaggttctttttagcaaagtatatatttctattaagcttttaaaaatttcatctgtggcatacttttgatttaaaatacttcttactctgcccataacaactattaggctatcaggaaaaaagaatttttggcacctttaaatatccaagcgttgtacaattgtttagctttgtgtataaatatttttgccccaattagtatacttctgtaactgtgattactgccgaaatgaattgaattagtatggattactttgtatagtacttaaattgggaggtacttaacaaatggccctcataatattgattatagcaaatgatagaattgtagtgctgtcaacaacatttaaatatatttgtaattcctttatttgtattccctctaatatacaggtaagtgtaacacccactactcattcaattacagactccgaaggtgaagtagatgcaaaacacagaagccaaattttacgggtggcatggagtgtacatgcttcaatatttccattattcacttatactctagatattgcgactctaatcggcgtccaacgaattagtcgtgttatgtactgatgagatttccttaaaattacttttctattaacatttgtcaatacattgtccctgttatataatccatgcaaagtaactattaaattgttataaattgctgtttttgaactttgacatttaatgaatgtaggtggaacataatcatgagaaattagctcactcgtttgcacgcaagttggcttaaaacagaagagcatgatatcaattgtaaaaatctcaaaaattattctctgtctagcactctgtctccctagtttttatcccctttatctctctctctctctttctctctgttcatattcgctgaagtcaccgtgtgaccattcttccttttagctttgcactggtcttcaataagtttcaaataccttgagtcaaaaaggatgctaaaacaagagtttgaagacaaaaagaataggtggatagcagctgctggtttaatcatccccttcctgtccctgctcaaatgttgaaacctaatattcagtgtggtggtcttagaaggtgaggcctttgggagattatgaggttatgagagctctgctctcatgaatgggattactgcccttgtaagacgtcaagggagctttttccccttctgccatgtgaggacacatagaaggcataatctatgaaacagagagtcagccctttctctagttgctgaatccgcaatgcttgggtcttggacttcccagcccctggaattgtgataaattcctattatttataagccttccagtttatgatattttgtaatcacagctcagatggattaagaaagtagcaaagtatcttcttcaaaatatccattaactgcagaggaaaaaaaaggaattttatagtggagatattcagcctacaccaccttaccaagtaattaatgttaacatcataagtgaaataacagatatatcagcccctgtaatttgagacactggaaatggctgatttattctgtagtattctgcccccaagttcataaattcaaccaaattatgggaaaatatcagaaagcctcaacatgtgggactttttaaaaaataggtgaccagaaatcttcaaaactgtcaaggtcaagaaagacaaggaaagactaattagctgtcacaaattggaggagattcaggagacaggaggaataaatagaatgtagaattttggaacagaaaagtgacagtggcaaacctggtgagttccagtaaagcctgcagtttagttaataatgctgtgtcaacattaatgtcttcagttttgacaattgcattctggttaatgttagcactggaaggcaagtgggtgaagtatatataggatgtctgtattatttttgcaattttgtggtgtctaaaattatttcaaagtaaaaactgaaaaatgtttgcaaggtaagccatgagatttattaacaccaaaatgagtctgctggactttttttgaaattagttcttacaggggaagagggcaatgaagcaacaatggcgggaagagggcaatgaagcaacagtggcagaaagtatgataaatgagaaaaatctatggcccacactttaggtccaagtcctccagtcaaaatgttgacaattctatgaggtaagtactgtttgctgaaaaagtgatccctgctaggagacagtgatgttcacatgctggcatgctgatggaagccgtgttccacacactggacgtgaactccatgagcgcggccagcatacactctggagatggaagagtcgccactttgtagaaaacacatggaatagcatcagtattgcagagaggactgctgaaactcaatgtgggtagcccaaggtataaattaaatatccatcaatccatatgaagataaatgattgggataaaaagtaaatgggagaaaaataaaacaaattccttgtgttgaattctaaatagtttctacatatctgccctcagaaggtggcatgtaactcccttaggagggctcccagttacttctttccagactacagtatggaaaaaggacaccagagtaaccttgcagtggacaagcctgacaaacacctctgccaggtgactaaggtcagcatctgcagtgctgagccacagtgatagcacaccctccttacattgtcatgggaatgacacttcacctctagttttcctcccaaaaatctatagctccagtcaacacatgaggaaaacatcagaaacatcacaatcaagagaatttccacagaatggtttaccagtcggcctccaatctgtcgaggtcatcaaagacaaggaaaacctgagaaaccgtcacagccaaggggagcccaaggagacgtgacgactaaatgccacatgaggtttgggatgggacccgtggatggaatgagaacattaggtgaaaactcagaacattcaatgcggtacggactgtagtcattaaagtgtcaatatcagttcattaattgtggcaaatggaccatactaacataagacattaataacagaggattgtggatgttgtatctatgggagcacttcatactgtcctcacgacttctctgtaaaagtgctgaaacaaaaagtatatttaaaaaactaaatcttgggagcaaggcacattaatttagaatgtttctgtgtttaatatctcattattttattagtatattactatactttttatattttaggtagtaataatattattgttttatacattttgagatattctatccacaactgataacctgtggttattgttaacccatttcccatttgggaaaagaaaaagcgtatctcactgccagaactcatttctcagggcaaatgggaaatgggttaaggaatatgtgagtattgtgggttatattaggttggttcaaaagtaattgtggttttagccattacttttgcaccaacctaataaaatgtcagtgacttcagaactaaagaagtcaatttttaaaaatatgtattacagttctctacggtactgataaaatttgctgcacggatttaaaatgctgtcccagtgagattaggggagcatctgagtgaggaataaaggcgtcaaaacagccttccagaggttggggaaaccactgggtggggaattgcactggctattcattcccaacacaatggatgaggcatctggtgaccctatgaccctgtggctgtaagagtaagcaggggtggaaaacccatgaatatttcctgacgtaaaacccattgaaaagggggtgggggctggtgccgacgtgtgctaaagatcattgtcttccaactggcaggcctataatttggacaaaacaaggtcattatattgaggttggtagggaggaggtatttttggagatatgattgcaattctgcccaaaagcaatgaccacttccccttggttcccgccctgaacacccactgatccctccaccccttgtaggcaaccatcccccaaccctcattccccagtgttgtgtgggagaagcagatgcgtcaacatctccaaagttcacgctgccgtggatggactttaggcttcgatgctatgtttttttgttttgtttttgtttttttcctttttctagttgacctttttctgctgatgacttagtttcatcttttctatctcctgcttcaccaaagctcagcatcacctaggctctctttgcggacctttttggttccctgctatacagtgatcaagacacttgcccactgcagggaaaacaaatttaagtatgtgtagaataactgcactaagtggacactctctgtggtaaaatgaccggaccaagatccctgaaaaaggaaatggtatagctggggtctgaatttctgttatgcgacaccagaactgggactctcagccatgactttcctcttcttgacacatagcactgtaattaatatagaatgcacttcaataaaggacatctttgacaaagcaaagcatgcattcttcatgggatgttattatataattaggaagaataaaatatccccttcaaatggaaactcaatttcattaaacaaccattaccaaagccataaagatcattgacctgacagcactggggcttattgagttctttatccagaaaaaagagaggagttatatgtgcactttctcaccagtgctcatgactggtcgaccaatgacacacatttcccagataattccggagaggagcgcatggtcaatgaatgaagcaaattagctgtcctattgtagtatagtctggccttgttactttataatatagaccattaactctacattccaaccacctaaactctctgttcaccgctcttcttttaaactgtattgcaaaaaggattataaaaaaccctctgagtataagcattcctttaaaggaaagttaaaagacttgagtatccattaaatcttaaaggtcatacatataattgcatctaagtttaggaaaacaagtcttcacatcaggtcttagcataaataatgtaaattaagatacatttgaatttactggcttctttgtttttaacgctttgcattgttaggtccataaacattctgtgtctaaaagaaacacaaaataataatgatggcccctcagtgtcagatgcattaaaccaatatcattacattgtgacaacgaccttacacattttgcctacaaggagctcaaggcgcagtaagattaaataaattgttcaagaatacctagttaataagtgggaaggtgtacattcattttatcacctaagctgcatatacaggggatgacaaagaactgagaggtcgcaccatcgtctgtatatcagcgccttcagtaagaattggtggaatattctggtctctgtcagcattaggattcgggagtaatagctgctccatgattaagcaatgctatcatcctctattatgggctttcctgtgtattaaactaagcaacttgatgatttgtttcaaaatttctcaccttagctccagatgacattcagaagtatataactctgagtactgacccagtatgttaatggtggttttggaagtagattctgagcagcattgtctagtacagtttgtattcctttccaagggcaagataagaatgttaggcggtgggcatggggggatctctgagtcaaagaagattttatgatgagagagttttcttttgcttatggaaatgtttacttgggggctacatttactacatgccttgcctcatttccgttaagtccagccagataccatgaatttcacagtagttcctaatacttcatacacagtgatctgtcgtctgtaattttattccaggacaccaacaagccctggctattgcagacaggttgtggtaccagaagcatttataaacctcaaatctgattacagggccctgaaacatggaagtgtttaataaagacgtgctgattaaactgagaatcaactatgtacttcagtgttcagagaaatattccaaagaaagaaaccaaaatattacagtgtgggaaacctaataaaaaccctgtcccatgagaaattccacatgtgcagataaaaaaaatttccttttctatcagcatcaccattttttcaagtgtcaaatgctacatatataataccaaattattgtgaaagtggaacttgaaaataataacatggaaataaacagaattttaaagaagaaaatatcttaaaatatattttagatactcataaatgtttataaatatgataccgtgaagaaaaatgcgttctcttttatggaaacagctctctcaacagcataccctttaagtagcacttggacaagaaggatccagggaccaccccccgcctcataacagatgtttggtcttgttcagtgttgttttttttgcaccgtctcagatggaatggtgttcctgtcacacctaaagcatcaacacaggcttcagcttttatcatacttgagcctcctcccttgggaatgccaggattctctaagaaagacatcctgctcaagattagaatcaccacactcctatgatttcaaacaagacagaagtgataaattacagacttttttttttgccattgccaacatggtaaagccttagccaattaagatccataaagggcagttccgaaatctacctcatggcaacgcacacaccacaatgcaacgcatctgaggcccatcactatgaagctacaaaatattaaatacttttggaaaatatacaacaaaggaaaactaatacattctaaacacttgctggttttttcaaataaagcttcttctatctactatctatgaatttgttgatcaaatagttgatactgtgacaaatactttattcaatactttatgaagtcctacccctgtatcagtgctgtaagcaatgctacttagaaaaggcatacatttctggaagaaaaataaaatagaagatttttttttgttattcaacaacctgctatttcatattccctccaacattaagtagcaacagacacgagtgggcctttcccagggccaaggcacgtgcacacactctatggagcaatgttgtgccacttcacatcagcaattcctaccggtcgggcttcccgacttcactaatcagtcctacagaacatcaaaattatgctacctaatttgagtagagaaagaggctactgtttgatcttaacaaatacaactgctctaatttctggtgactatcaacagagtggctggatggcttccagatcaaggtaatcatcttcacatcaggaaatttcctctgtcacccaggatggagtgcaatggcgcaatctcgatctcggctcaatgcaacctccgtccccctggttcaagggattctcctgcctcagcctcccgaagagctgtgattacaggtgccttccagcacacccagctaatttttgtatttttagaagagacggtgtttcaccatgttggccaggctggtcttgaactcctgacctcaggtgatcctccccgtctcggcgtcttaaagtgatgtgattacaggcatgagccactgcacccggccacattaaaaaagttcttaaataggtgtttgatgtttattcatcaggctttcaaaatactatctgttcatgttaaacaatgatgtagtctgacaggcagtcacctaaaacgggcccttcactgccacaaataaccgacgtggccccagccttaacatttgttctgaagggcaaatgcatgcacttgctacagcactgatttcacttagtacatgtttcttttcttagttttatttttaaattcatatttaaaatagatatttggagcttagtactaccgtattagtagtcttaagaatattaatctcctttcatttttttggactgcacattactacagtgtattgtttttaaggagtaagaatgttattaattgctgatttaatgtatttatgaatcagtaacagatgcaaagacaattggcatcatcctgtaggcattatccaaagcacatgctaaaaatagtaatatagtatttttatagagaaaattcaacccatacgttgaaaattataaaaatctaaagaggaattcatgtcgattgtaatggttgtttgtatttgtagagtgttaatgtctcatagcttaaaaattattttgtgtttctgggaaactgttaaaatctggatatttaaaaatatatgcttaaaaattaatgccagaattttctcagaaccagttctccaggaattccagagtttctcacccctcaacattcagatacccaacccagagcatcagcatctttcctttaagttcatttcctctgtttcattttaactttccctttttttatcactacgatttctccagtctgtgccatcctgtcttctctgtgataccttcttgtgtttgctcttctctcgctgtacccagaatcttgacttttacccgggaatttcaaaccttccgtccctggttatgacttccatcccactcaaacaatacacactatcagacattctcctaccttccatccctggttatgacttccatccaactcaagcaatacacactatcagacattctcctaccttccatccccggttatgacttccatcccactcaaacaaaacacactatcagacattctcctaccttccgtcctcggttatgacttccatcccactcaaacaatatacactatcagacattctcctaagttccatccccggttatgacttccatcccactcaaacaatacacactatcagacattctcctctctttacatgtccatcaaaaccaccttatctcccagtctccaatagagaatctcaatcccattgcttgtctaactctaaagaggaacttaaagcaagcctaaaataagtaagacctataagagagaaaggcctgttacggcagggcatgcagtttatatttaatcagagagaccctggcaagccatgggagttatctcagcctttcaggaagattacctgatgagcccttgcagaatgtattgcagacaaggatccagatggtaagggatagctggcagagaagtgctaatgatgactttaattaggggtagaaacagttggtttcagttgaagagatacaataaaaaaatattctgggctcttgggattaatgtaaagcggaaataagaccacagcagcaaatgttgaatccctcgtggatgactgaaaaaggtatagtatcatgaatagttaaaaggaaacttcgaggcagataatactattgatagaaaaatcatgaagtgtaatatgttacgattatctattgtatgaatgaaaggacagtaatcggcttcatttgaaagggactgagtttgagatacatgggggatatccagattaaaaaacataaaacggatgcacagaatttcaaaagccaattaatagagttaggataaatggaaagtttctgtaaaacggaatgaaggaaatttcttaatttggaaaatgagttaacacaatgccatcttgtggctaggaggtatctgagtgtcactcactttgtctaaacaaatgtaaatattttatgcttcaattatcattttcttaagctataggagcagactttttaaattaagtcactctacttttagatagtaattcctgaaacaatttaccgtaagtgacaaatgagcctacactcagaagtgcaaatttcttcttatgtgttaaataatcatggaaaatattttaaaagaattaagtaatgactcaaagcattatgtcaagatatgcttggtctccataatcaggaagttgagtgtactttcatatcatacttgcataattgttcataaatactatttctgtgggagcttatcttttacaacacgcagaagagatgcataaatccaaactggcaaaaaaaaaaaaaaaaaaaaaagagttgaatgtttggaagtatttttaagaatttaatatgaaaccatttacaataattaaaaatgaaaaactacatcaattaagggcttttacaaagagacagccttgaggcaatagtactttattttagctaaaatagacatatttctacaacatattcaaaaatcctatctgaaggcttatgagaattaacaagacggattttgaatatgcacttcaaaccgtgtaggtttcttttcatagccacaaatgacagctgtcaacaaatattctttaatgtccttattccaaatcgtatctgccaagattatataaagaaaaaaatatgactatcgagtaacaacaaaggatttcatgtctggtaatttaaaattttactctcagaagacacaatcatgttaaacacataattgaatccatttacaccaagcatctattttaccacattcctgatgaatgaatgtccacctcatttggactaatgtcagaagtaaaccaggactaaagatacagctgtctctgcccagctaaatgtaattatttaaaaacttacttctaccaacagtcccactaatgggcatctacccagaggaaaagaagtcattatacgaaaaagatatttgcacatgcgtgtttacagtggaattcacaattgcaaaatcatggaatgaacccaaatatccatcaaacaagtggataaagaaactgtgatacacacacacacacacagacacacacacacacacacacacacgaacacatgatggactgctactcagccataaaaatgcatgaattaatggcatttgcagagacctggatgacattggagactatttttctaagtgaagtaactcaggaatgaaaaacaaacatcatatgttctcactgatatgtgggaggtaagttgtgagcatacaaagggcataagaaggatacagtggattttggggactgagggggaagggtgggggggtgatggataaaagactgcaaatagggtacagtgtatactgctcaggtggtgggtgcaccaaaatcttgcaaatcaccattaaaaaacttacctatgtaaccaaataccacttgaactccaatagctcatggaaaaaacaaaaaataaaatgtacttgtttatacttggcagaaaaaagtaaaaataaaataaaacctgtctttctgtgtattcagtccttgatcctcccagtacctctggacccagcactgaataatcctgccttccctttgatttaaaaaccatttaaaactttgaaatcagctgaaacgtctcctcttcatcttctctcatccagctatttgttcaaagttactaatgctttgaaaacctgttgccatctctacgtctcttacctcacacacttgtaacataacatgttctttgtaattgttcaggtgtgacctaaccagcattaagtaagcatgcagttagtctggtcttattttacatttgcttttctcttactctacattataggaatgtttccagtgaaagtctgtacagaatgataaatattaagtgtatctgttctaaagcttttcattaatttaaaacacaaaataacatcaactggcctgttactttttctggagggagtgggctacttctagcaatactttctctcctctttgggtcatatattaagcataaatgaagaatacagaaccaggagaattagaaaatgcgatcatataactatgtaatccttgtcatccttctcttggtgagtgtaaagagctgatatgtggagggagtacttggaaattactattaatgaggtccccagaattagaccatagaaacatacgaaaatctcacataaacaaaacaaagaaacaaacaaacataatttggttagtgcttttttttctcagaaatgtaaaagaaaaatacaaaggataatatatcagtcatatactcagcagaagacactaaaatgttaatttatcaaaagaacaagagatgtttaagaaataaaacatttcaagtgaagtcaaacttctctacaaatccctccacaaatcgtagtatccacttccctccctaaactccacctttatttttaatttggggtaaacacattctaagatttttttattttcctgtatattttaaaattggcatgagtagttacacaaatatattgtttgcttctttatttttgaaacctattaaaaatgtaaagccttacaactactttatttaaagtactctaaagcataatgtctacatgaatattacaaactttatatatctcccgccctactaacaaacatgtgggttgtttccagttttccactgttataattctaggatgaatagctctgtgtatgtcctatgatatgcatgcatgatgtacttgctcatcatttaggaatattttttaactttcctagatattaccaatttgcttttcacaaattgctatactaatttacattttctagagcaatttgagaattaccacttctatgcattctcctaaacatttggtattccataatttttaatgctcagcaattggactttaattcattgtcatcccattgtgttttaatttgcatttcctgagtctggctggtataaacatgtttttgaccagtcaggtttcctcttttgtgccttcttcttggggaaaaagaaaaaccaactacttttttaaaactgtcacgaggagcaatcaagttatctcttattgaagttaattgggaaaagaaggaaaagagaaataaccataataataccacattccaagcctgggagatctaaaatgttgtcaatgtaacaggagaaataaaacatcgtatagagatatgataaatgacatattggatgtgttttatcaccaacatagttaagaaaactgttacccacagaagcgtccatttttatttatttatttatttatttatttattttttgagatggagtcttgctctgttgcccaggctggagtgcagtggtgcgatctcagctccctgcaagctccgcctcccggactcacgccattctcctgcctcagcctcccaaggagctgggacgacaggcaccccccaccacgcccggctaattttttgtattttcagtagagacggggtttcaccatgttagccaggatggtctcgatcttctgacctcgtcaggatggtctcaatcttctgacctcgtgatccacctgcctcagcctcccaaagtgctgggattacagacatgagccaccatgcccggccaaaagtatccaattttaaggtgtacctcacatgtttcatatgttgtccttagtcccccaaaatgtagaaaggtagttatcagtagaaaaccactgctaatccaaagacacacaaatacttaaaacagattctgtaactttctaccatatgtgtgtttgtacttcaggaattcattttatcctaagaatcatctgggatcctgtttaaaccccagagcactagggtcgttgtctagatcctggaatgaggacataaactgaaggcagccacaaatctgtgtttctctagggacccagataatgcctgtgctcaggcaagtatggcaagaactattcttcatcaagctgtttcctgaaaagttgcatttcatgcagtaagaagcactgtgtgcaaagacagccaccataactcccccactcactgctttcactcatctttgccattaactctaccctttcttctcttaagacatggtgtgtttccttctcatcccttgactgagctgagctatggacttgcttttccactacaatgcagaaaaagtgatgtaagactttgaagactaggctttcagagccttagtgattgagagaaggaacataaacagctaattatcagagtacatatgaacatagaactctgacccacaccctctgctgtgaccagtgcaggagaccaagccacaaccactgcatcaaccagctcagagtaggtaagacttggccagtgactttcagctaccctatttttgcccccgcttttgactccagaccaagcagaggaagtgaaatacactgctgggttgactggtgagaagtgggaagacggcttacttccacttagctcttcgccaccaccagcttccccatgtgaaaaacctccaagtgcaatgtgcctgaagccttcccctcttccaccatagggctttccctctcccctgagtttgagcggctgctaagctcaaatcatggcagctgccttgcttgttctggcaaacctgagtcaatagcctctgttctcatctgggtatgtccaccagcttctgccgagagcttcttttcagatgtcttagaaccctgaggctcccatgaagaatactgagatagtctccttgagcagaaagcacattaaaagagagacctagtcaacaccaagcatcaatcctaaacttgtgagtgggtaagtgagtcccagggttttgggggcaatgcgaccctgtgggacaccatgggtctgcagctgcatgagtgtccaaggaaagaccagcagaatctgtacagctgagtcaagtccagattgctgaccactgaaactgtcatgggcatttttgtttcaacgtgctaagtcttgaggttgctttttacacagcagatcgttctaacatttttcaatttacttgtgaggatataaactgaagagttatttgcatgtagctgataatatatcctggaataaaacacaagcggcaggttttaccatggggaccacggatatgtagggaaggtcacatgaggaggagcagtaaagagaaaatagagattaaaatcagagacacaaaattattcaaatccctcccaaaaatatgaagccaaagaacgtaaacttttaaaagaattatcagtccattggcatcaaacactcctgagccaaagaaaaggtaaagaatcacggtttgtgtgtggagatgggagtgtcattggtcactaggaaacttaaatataaaaacttgtgtaaatggctttcatctgaatttgctatgaattgaataggatatgagaaaagagcaggggttttttgggggggagggttattattattattattatttttttttgagatggactgtgggctgggcacagtggctgacacctgtaataccagcactttgggaggctgaggcgggcggatcacgaggtcaagagattgagaacatcctggccaacatggtgaaaccccatctctagtaaaaatacaaatattagccgggtgtggtggcaggcacctgtaatcccagctacccagggaggctaaggcaggagaattgcttgaacccaggagacggagcttgcagtgagcggagatcctgccactgcactccagactgggcaacacggtgggacactgtgtcaaaaataaaaaacaaacaaaaaagagagatggagtgtcactctgtcatccaggctggagtgcagtgacatgacctaggctcactgtaccctccgcctccggggttcaagcgattctcgtgcctcaatctcccgagtagctgggattacaggcgtgtgccaccacgcccgactaatttttgtatttttagtagagacgaagtttcaccatgttgcccaggatggtctcaaactcctcagctaaattgatctacccacatcagcctcccaaagtgctgggattacaggcgtgagccaccccacctggcctacaaagcagtttttaattaggtgctttagaaataaaaggaatatcacaaagttgaggcagcagaaaaatcattttctaaattgccaaggccaagaaactgaaggagaaattcagttatggttgtgaaatcatttaatagggaaaatacatagaacccaaaatgcagttttatgaatatcacatgcatgattatgttgagatggcagcagccactatgtagatttaaacatatctcatacatcctaggcccagtttcacttggcaacagctagataagcatgcagcaagagaaaggccttctgactctcgtttccaattaatgagtttggtaaagtgtcattgattaaattatcaatgttgaaaagacgtgagcactagcccagtcaccttcacactcctatactataattaaccaagaacctggaactccaggagcagaccttgaaaatctctgatccatttgccttcagacattcattgccttaaaaacagaaaaagctgcaatccttaactgatcatctttatatgccatattttcctatgtttctgtatcttttccaaagttctaggaatgtacacacatggagcacacggaacaaccatgagacatatgaaatatacctttccatcttaaatccgttagctagattgtaagatattgcctgtgtttcaggtattaacgcagaatatgccatttgccaatttgctacgtaatagagcaacacatatatagcatggctgccttcaaagaacacctcagtgaagggctaatacttctcagttactcatatctgaaacaaactcctcaatcctctcagagcactaacgattaattttccagattatcttctaagtattattattgagagcttattcatttgaactatcatccaacatacatctgtgtgttgtatacttctgagacaagtgcctaggtcttagaaaaacagtaattattttattctttcataagaaaacaaatataaaaattgacatatataatgaagttgagtaaaaatgtttaccctcctatgtttcaataatttaatggagaatgtagttattctcttgggttctaaatgtcctgtttccatcatgagctccactagaaatggttttcttagaacacaatcaatatttcgtcctattcaatatgcgatttttagtactgagtctttgaagaaaactgctcaggttctctcccttctgaaatacctctgggtgtgaatgagtgagatgaggcgctcattcagcctaaactcattgctttggagcaaatggactttggttcaacccatgtctgtggatgcccccagtagctgcaggaaggtgagatgttgtcattagggctgggaactcctgtgatagtagtagaatttctcctttctttccctattcccttgggcgtcttgctggccctgactggcttatctgttgcccagatcaaagagtgacattttctcttttcctgatcttaatcagatccatctgcaccttcctgttgatgcagcctcaccttagttttcagctgactttaaatttctggattttttcatggtcctttgtgcttctctgggctagagagtccgatacaaccttgtctacacgtctgttttcaccacagtgttcctctacagcaggtgcactgaatctcaactcacagctcaagaagttaagaaagggaagagttaattcacagttaagaaagggaagaggcacagcagaggaggtagaccctttccctctgcgtggcatatcccatatccctttcccgtgctggacagctccagggtgtcctggcacctcctgcacccacatgaacctccgctgggagacccagagagtggagctgaagccctttgtccctgctgtcctctgacactcccttagaacaacccctcctcttttagccagagatgagagaacatcagacatctggctggttttctcctcccaactgtttatcttcttttatcttctctcttactccagaactaccacaaagaagggcttttgctaattcttcataacttcagccccttcgctattcttagtatctgagagcattgtttgcattaagactaggggagtagtcccaatatctggtccagctagccaggctccagaagcgctaaagaatcataaaaaaaacaagaaaagcagtctctcatcaagaatagcagcaagattactgtttcgatgaagaatacaaatctccacccctcactccctacaccagttccccacctactgttttttttttgcctgtcgtggagctataactatctgaaagaaaggccaagaggaggatagatttcaggataaaattattaatattgcccccattatactaatacttctatctaaatgttttgataagactctgttccaaaagctagggagacataaacacaaacatgtatgatgaagagtctttgtaaaattagcagctacaaatgtttctgctgtgtaagcatttgtaaaaaaaaatgctaagtggaagaagagaatacaattcaattatgcatgtgaaccctcaaagtagatacacattaacttagaaaatgatagcatgaaaaccattacagtctttaattcggtagtgtatctagaaacacatataagtgtaattgtaagtctgacagtttttgtaaccgttgaaatattccccatttatgccattaactttagataaatatattctgttacttttaaaaatggaatgttttataatcattttgttctaattctatagaaggagtagctagctataatgttggcatgcatcacccatttctgtcttataccatctccatttgtgtttagtatttttaagttttactactgtaatgggaatgtatgctaaatatagaagtaattatttgcaaagcaagaataacatttccagttgggcacaatgactcacgccaatcccagcactttgggagaccaaggtaggcagatcgcttgagcccaggtgtttgagaccagcttggggaatacagtgagacatcatctcttaaaagtaaaaaaaaaaaaaaatagccaggcatggtagcatgcacctgtactcccagctactcaggaagctgaggcaggaggattgcttgagcctgggaggcagaggtttcagtgaaccaagactgcaccactgaactctagcctggtgggctacagagtgacagccagtctcactctgcaatgggaattgcactggatttatcgattgccaaaagcatacgaagaagatacttgcacagttaagtttatagcagcaaaattcgcaactgcaaccagcctaaatgcccatcaagcaatgagtgcataaggaaaatgtgatacacacacacacacacacacacacataaatatctatatatctccccatacacacacacacccaatggaataccgatcagccataaaatggaatgaaatcatggcatttgcagcaacctggatggaaatggagacaattactctaagtgaagtacctcaggaatagaaaaccaaacatcgtatgttctcacttataagaagtgggagctaagctatgagcatgaaaaggcataagaatgatacaacaactttcaggactagggggaaagggtgggaggcagatgggaaacaaaagactacaccttgggtacaaggtacactgcctgggtgatgagtgcaccaaagtctcagaaatcactaaaggacctattcatgtaaccaaacaccatctgttccctaaaaatctaatgaaattaaaaaaaaaataaagaaaaattattacccttctcaaattatgcacacttccccatctctcttttccctaagaagagtatataaccatctgcacgccatcacatggtcgagcaatcactctcatttctacgtccatgcatgatgatcaacatgtatgtgtttgatcctattttaaaaaaaacaagaacagctcccttctgtttatttagcgtgtgagcatgcgttttttcataaaaactgagcattagttacctaagcagaacattgttttctaattttaaatgtataagcatattcaactgaagattatctttccatgaaagaggaagtcgaaaaagatataatcttaagtggaaaagagaagttacttcattcaaaataagaaatcattaggaacatggaaatgaagaaagcttcgggagatacgtgatctgttgcagggttttcatgaaacttctgtgtgcccatgagcaatgtcaacaagcctgagactctttttttttttttttttttttttttttttgagacggaatcttgctcttttgcccaggccacagtgcagcacctgagattcacttttatttgctaatgaaacagacaatatgcatcacttgttctaagattctgctttaaattgcggcagtaagatgaagaaatagatattaataagatttcaaattaactagatttgaatctcaaaatacaaatatgtttgaataacaaagacatgaagggaaaaaccttaatactgacatgtatctcaatattacatgctaattatacaatatttataatcggaaaataatgtaatgtcaggatacatctttctaattaaaacaattttcttccaatgttctaatggctccaattgtcacaattttaagcttgttctttaaaacattctagagtaggaaaaaatgggttgtcatacacctgctactgaaaagacttagatgatttttaaatacctttgtctaggtcatacatactggtatcaatttctaacttggtatctctctagaaatatcaaatagctagtattactttatcagtcaaggaagagatatgccatcttttatgttgctaatgccacatctggcaaagtgtttagagcaggtggttctacaatgacaagtttcctgacaacagaactccaagtagctgagaatgtagaaggatgatctgtagtatgtggtgggcctcactccaaggaggctgttgtaatattgtggtgtggttatttctacttcggggtggacaatcgtctctactcttagtatgagttttaaatattcgttaggactgatagctttaaaagtttttaattatcctctttttaaattgtcttgctgcaacttcttttttttttttttttttttgtgagatagagtctcactctgtcaccccaggctggagcgcagtggtgcgatctcggctcactgcaacctcctctcctgggttcacgccattctcctagcctcagcctcccgagtaggtgggactacaggcgcccgccaccatgcccggccaaatttttttgtatttttagtagagacggggtttcaccgtgttagccaggattgtctcgatctcctgacctcctgatctgcccctcttggcctcccaaagtgctgggattacaggcatgagccatcacacccggccactctgcaacatttagctacagctttcaaacaaatgctaacagatttatcaattagtttctcatttatcaaaattattgatcagcactgttctttcacctatgaatgaccctatcttgtgtggtattttcttttcaaggtctttttatgtctaattgaaacttttaaaccataaaataactgacattctcaataaaaaataaaagtctctaattcacaaatccatttaagatgctccagaatatattcttgagaatgttttttaaaagcttcttccaggaaacagtcaaaattatttactgagcacctaatatgtacacagctttgtaaataagtatgagacaagtgttctgtaagaatctcagtcgtaacattcactagctggtgacttttagccatgtaaatgcttagagctttaagagttttgtgtttaaaatgggaataatgataaaactttgtgtgatcagcatacagattaataaataaagatgatcctagcctggaatttactatgtgtttaaatatatgacaaaccgtatttccccttgtgtgtaattcctccccacaaaaacagcaacaaaggaccatcattagtaatgagggagcttcaattctacatgtgaaaacaatttaaacaatacaccatatagtgaagtactaaattacagaataaaataattagaatagagtttcaaacataggcaagggctaaagaggttaacgtcatatgtgagaaattgatgagcctttcaaagaatgggtatgattttactggcttttcctcatgttcacgcttaagttcaatgtccttagcttaacattcaagaaactttcctctctgaatcctggccacctaactggcataatcccccttttttgtctttataccacccctggatcttgccatatttgtagttgtaacaccatcctagatgtcaacaatgtgaatttcaatcagcacatattgtagtctgcagctgaatttattagtacagaaactccttttgaaaaaagcagttttaccttgaatctaatgaagacttttgttttatacatcaggctcctgaattttcctcatgtgagtctatttctaaaagatgcatctgcttttaggaagctattaaaataagttttctaagccattaaggtgagagaaagatcccagattaaaagtgtaccaaagtagtaaatatcatcattttaagctctcatgagaagtaaaaggttggcttttttctccagacctcatctagggctctctggaccaatgtattagcaccaggttgataagcctttctttccaagtgaattcccacaccatctagtggaggtagacagacacacacataattaacttatggacagtatcagcatgccaaaagagagatctaaatacgagtacattaaaatagtgtatactctctgctctatagtaatttgtatttgggaaaatatagctgtggttagggaagtaattactgattaaatacaagccatagagaaagcagcttgaagcaagcttggaagttgcaaacttatggacatggaagaagttctggctctctggtttaatgaattaaaataagtaagatactagcaaatgggatttcgcagttcctggtcccataggaaactgttttgtgtgtgttataaattgtcaaagcttccaaatgcttttcatttatatatccatcctgtgtttgccgttccaggagcatatgtttgtacatgtgcacatgcatgtatgcagacatcgagattcattcatttgctccacgcaaattcttgtgttcagcaacatcacgagttctaaaaaagtcaataaaaattgccctctatgcctttcgtgcaaggcacagggccagccacatcagccattactttcattagagctgctggagtttgaaataggatggctgggatccagactgacctgcaatcttgaagtctttaaatttaatacaacccatattttaggccgttcaggctaatttgccttttttttcagattttttaatggacactttgtttctaagagtttctctctaatagagtgcatacagatcagtttttttttttttttcctttttaaaaaactattgatgagctcatgcttttaaaggattattagggcatttgaagaacattttttatttaatagcagaaaaattgaactcaacatggatttaccaggtgccaatcttttgtatattgcaatgactcagtacaataccaacttcacaactttattttagataatattatgtcttatattccctaagtattttaacaggtgtttcttaacatgaaactgagtccatttaaaatctgaaagttaatatacgctgagcatgcaatatgatatacttgattttaagaaaatgagtttttacaaagaaaattgaagataaccttcttcagctccacataaagcttctgtttgaagctgggagtcgaggattcatcaaaacaggggttccatccaaattaagagaaaaactcttcaaacggtttctgaaataacttaatgaatttcagcattgtatgcttatttaaaatattagatatatgtcttgaaacctgtaatcaagtcaaagtgcttttataatatttctacaggaataaaattaagtgtgctccaatcaaacccacacgtattgttattacattttattcaccaaagaggtgtatcagatgttagttgtttatgaccacaactattttatattatttggacatgttttaaaaacataggtaatttcaagcttccagtggcccaagcagcaccatcccctcacccagagaggagaacctcccaggtcagcttctaccctcccagcagtagctcccctgtctgatgtttgctttgagcctgtctagaccaatccatcatgtcctccatccctgtcacctcggtcaccacaagaatcccggattctgtgtcgtacccgaccctccatctcattttattctcatcccaaataccggaaaaactcacctcccatctaatcctccttctttgagaattcccttaacattccacctgaagctggcgtcccctctcttgaacatagtccccgcagccctgtccagcagtgcttcctctctcactcacccctccgttccctgggattggctgctcatcatcatttcctgactttccccccaaattcccagctttgactcttctgtcttcaggttactcacatgtagatcctcttattgaagccatccatcccaccctgctctcccgtgcatttgatacactggctccttgaaaatttcagcaccggactccctgccacattcctgctgctaccactgttataattcgtggtgacttcactatcctgctaaatggtccttctaaccccatggcttcctttgttctcaacctcctccccttccgatgaacttgtcttccattctctttcattaattagtcatatggtcagagaccagccctaataccaaccacatctacttctccaaaattgcgactttctgacatcccatgctcttatctctgttttgggggctcattccctccaggaacatcataaactgcaaatccaattatcattccccacggtctttgccccttctctcctctttccctccttcaaatctatacttcatcatcacactccttcccctgactgcaccctcaattcccttgttcctctctggctctgacctctccgctagccttattactgctgcgttcctgcagctgagagtgactggaagatagcatggagctaagcttcctggtctctctgtatgttcatgaccactcctctcccaagcatccatatagcagccccaaaattatgctcaattctcacagcctctttattcttccactcttgaagggagacttttatagaagatgctttgaatattacattactgctccccattctttaatcttgcaagacctatccctcatcacattttcattaatgaatttgcccattacttcatggagaaaatagaagcaatgtgaaaacagccgtcatatccttctctcacctcattcaactacctctttgcatctgtactgaatgcccttgatgctgtgagtataatgtcctcacttttttcttttttttttttttttttttcttttttttttttttttggagacagagccttgctctgttgccaggctggagtgcagcggcgcaatctgggctcactgccagctccgcctcctgggttcatgccattctcctgtcttagcctcctgagtagctgggactacaggtacctgccaccatgcctggctaattttcttttgttgttgttgtttttttagtggagacggggtttcaccacgttggccaggatggtctcaatctcctgacctcgtgatccgctcgcctcagcctcccaaagtgctgggattacaggcgtgagccactgcccccggccaaaatgtcctcactttttaaagcttccacttttacataagacattagtctgattactgaaagatattactcaaccaattttcttttccttatgagaatataaagatcatttctcctacgttaaaggcaaaacagtcaacaatgaacataactcttctcttcattccccctttctacaactattccatttccttacatttcattttagaacaaaactccttataaggaagtctctacttgacctctctaacttctctcatctaattctcttttgaaccacagaagtaagagtttcacacctgccattcgactcaaaatgtccttatcagggtcaccaatgacctacttatggtgaaatccagtgaaaaatcacctctcctcatcagtcatgacttagtatcattcgccagggctgatcacctcttccttcctgaaaggcttgagttgacttctaggacagtacacactcctaagaactcccccttttcaccatctggtctacttagtcggtgtttatttgttttcatctctctagagtctaacccctagagtaaccaaaatactcttttgacctcttcatgtcactctcttcttgcctgctgatgacctcatcttactgctagcaactccacttacgtttccatcttgatcctctctcctggacttcagcttacatttctagctgctcaaatggcatctgccattgggtgtctgattgggaatttacatttaacttgcctaaaaatgaactcctgattctcacatcccctacccacacccgcattaactccaatcttcgccttttgaagtgtcctctttcaaaacctttggcatcacccctaaaactctcctttctcaggtcaaccaatcaattagcaaactcgattggtattaaagttaaaatacatccagacttatccaaaaacactctacgccagagctttttacgtgcttttactgctttagggaatggtatttctccagaattccacgcgagtgtttatctttttctcagcgtagagctttccggaacactctatttaatattgaaactcaacctatagcctgacaatccgtatgccacttccctactattttatattatctgtcaccttgtgataggctatatatttatgtcatctatcaccttatgatatgctgtatatttcaatcatgtatttgtttatgatgtggctttctccactggaattaagacccatgagcgcagggattttgtgctgttttgttcaacgctgtatatgtaatctctagaaattgtttcagttaatcatcaataaatatttgtcaagcaacgaaagtaatttttgcaaagccaaactatgtttgaggcatattgagtgatacaaagatgagcagtggggggcaaaaaataagtttcatgaaggtgatgtttaatattaaatatgaacatttttaaaactcacttaaattttagctagtaatggcaaaaatggcaatttcttttgcaccaacctaagtaatgtgaatttatattaaatccattaatatttatcttacactatattaaacttatgtttataatattaatatttaaattttacttatattttcctatttatgtttaaatttatttggatggcacatataaatgaaagttgaatagccataagcaagacttgaactaaatatgttctatgggtacacagtaagtgaggcaataacaacaacaggcccttacactctaccagccacacttccatgcacttcacatttatttcgctcattgaatttttccaaaaagcctatgatgtcagtcatccgatatgattatcctcttttggaaatatggaaaccgaggcacaagaggattagtcattttctcaaggctaaaagctaagtaataaaactgaggtttaaactagcatgtcgtgactatgctggacactttctcaaatcaatgctgcatccatggtacagcgttcagaagagattttcagactattgccttagcattggttatttcacataggagaagtactcttacttcctggaatccaccataaatcctttgtcaacacaatgtattttactcaaaggagactaacccgtggttttgcatcaatggaaatgcttagcttggaaaagagaagtcaaaaaaggaaaatgatattatcatagcatattgaaataacttccacttagtttttttctcattttttttttcttctcaatttcctaagaatagaaatggtttagattctggcacaaactacttgttacctgcgtgaacataagcgagtttcttaacctcagttgtcaattgtaaaatgaagattttaacgcccatctatagttgtgtttgaaagagtgaagtgaagtcaatgtgcaacacccagcacagcggcttaacaaaaaattatagtaagtgccatgaaaccatcaccatggattcagaaatacactatacaaaacgtgagtttgtttgttgacaatcaaaaaagaaaaaaagaaaaacaaggttttgcttggcattgcattatcctcgcatgagacacatcactcatcgctaagctccataaaacaggatgtgtctattgcttcttatgaaaccatctttgaagttagtgcaccaccagacaccccagaaacagtttaagctgtatttgagtttgttgagtgattttagacacatgccctgggcggagcagtgcgtgcctccaagacacagcttagaagtgatccactcaccactttagaaatgcatgtggttatttttggtcaatcctaatatttgctccaaggagcatctcgtttcctttaattagtatcctgagtaatgccttctgttctgctcgcctgtcctgtaacagacatggctgtgacgagtgagagggcaattcattcagactggcttgtgttagaactggctgctggaaacaatgccagcaactttatttttggtctattagtaaaatgacagcactaattcatttcacagcggaaccaaacagctgtcagatggcagtgagcataatcgtgcacacattagaatttagatatgctgagtaggatttttccactggcaccgcattctactgtaatgtgctccaaagtccccccaaatggtgcaagtggctctcctggtgcatttgccctcagatagtgcaattcaaacaaaacaaaccctttgcaattgggcttccagttgtgaattcaacacactcaaaatgacagaatttagggaaagagagatgacaattagatgattcatgaaactcaacttttacttccccaacctcataaaaatgataccccaagagccacaaatttcaaatttctgataaatctactcatcatcctctgggcattaattagatgggaacaaggaatttgactagttgatattacttttcattctaagaagtttgaggagcacagagtcctgccttctgtaggcatatgagcttctgagacagataagacacccacaccaaggaaagtgaccggaggctgggactggccacacaacaggaagcatgggcactcctcctggccatgccttacacaaaaactacacaaagaaaactttcaacaagcttgtgatgtccaaatgataccagagaatgtattgtttgccaacaaagaaaaaaataatttactagaactcctgagtcatctggtgtttgatgaaggtgactaacaaagttgtcttgtcagttacagcaaaactattaaaatgtccactgtaaatacagctcgtattgagggccatttactttctctattgtgcattgagaaagtgggttaaataacaagaccaagctgacttaaaagggaagagtatcttgtttcctaaacgaggaaaatgttctagctttagggttgggattccacaccatagctacgggtcccctgtcttggtaaataaagatttattgaaacacggccaaggtcactcaagtattgtctatggcgctttcatactgtagcagcagagttgggtagttaccacagacaccagatgagctgcaaagccaaaagagtaactctggccctttaccaaagaagtttgccagtcctctttagagtgatcacccctgaattccagctcttctatgccacaggatgtcaatggaatgtttaaaaaatgaccttaacttttggagtaatttcataggaataaaatcactgctataatatataagggatgaaatgaaaacatatacaataacttttttaaaactcaatttttactatgactcttgtttaacaggctagaaggcaacttgtgtttaggttgctgcaaattcaaacaattgaattaaatgtgattaaatcaaaagtatgttgtaaaacgtaattttgtatataataaatttcattgtactctgttgtatttttacagtgtttaaattcagagtacagatatcttgtgctaatttcatatagtaatgtataaatgaaatgatacctcacttaaatttctaggaatttcagtgttaaatatattggaattcattgtaaatacaagttaattagtgcctttgtctttgtgaacttcatacaaatttaaatttgttatcacgatattcataaatagctgtagtttttccatgattcatgcatgtaagcattcctttaaaaacagtcaagtaaatacagaaattttgatacacatgtcagtattgtggcatatgagaaggttttgaacaagtgtgaaagtcttaaaaaatgaaaaatcagatgtggaatgttgaaagctcatatttatgagttaagatggataacacatccaaagctgaaacgtgttcagcatcttattcctgcacaaaatctcccatttgttatcctcctacacccggcaaaaatcacaggagaaaactgcaagtccccacacaccagctgtccacttactcaccctcctcccctccccaaatgtagctttccattccattattctaatatttaaaagcatgcttcacaaaaagtttatgcctgaatggaaaaacaaaatggaaacttcgagtacacatgtgatttaaatgactaccaaagcttagtcagatgtatacaaatcagtgttgcaagttgacaggccccaggccattcctccttccttattggtggtgtttctctctcctcagaggatatgaaagaatataaggttatattatgaaagaaccagtgtcaaaaacgtcttcaagtaagctacttaaaacaaactgggaagctgtctggaaagggcgtatcatcctctactgtcaaaaaagaggcattttaccctatgaaaggattctccattgatcaggttttaaagaaaagaattgggagaatacaaataactgcatgaattattgactgtttttaatagcttaattttacttctttatctcaagcttctaaacaattcttggacataaagattttcctatttagatttatattactctgatttgcaccaatgaatgaaaagtgaaggaagcaattaagaaatgtctgataatggaaaatgtactctatatgacaccatttcaagttgatcaattaaatcaatagttcattttcttgaaaccaagaataagcccatagttgaccagctctcagaatatgaaccttgtagaggtcaacagagtatctattgtgcaggtgaggccatcagctgccatttttctggctccatttaaagaaaaaaaatagcacaataaagggggaaaccttttagactaacatatcctttgaaaaatatacttacgtttagaaacacagatccttgtttgatagtaaaccatcaactttaggtagcaagaacatcagaaatcataaatttacatgttgcattcaaattcagaaagggaaatgaactgtgaattctttgccgactgatttaagaactctgaagacaaaacaaatatctgtatcactttgtcatttgggtgcacattcggcattgaatttattggatagcagactgtgaagccttttttaaagtttagcatctgcatatggctataaattatatttaatgtactatacctgtattttacaaaatgaccttcaaatgggagatttttaaaaaattatctacaaaatggaaatgaatttgattgatgaaattcgaatgcatttttaccttaacttacatacttcctacttatttccagtgttctcggctttgtgttaagtcaatatatgtgttttttcttctcttaatccaaatctatgtcattctctcacatcttctcctcgaattgcctcagactaacaaaagataatttaccctttctcagtgattttcaccccatattcttgtcattttagaataaaaacaaatcaacaacaaaaaacagcaagaatgcctatctacctaagttgatatttgagaacaataaaaatgtaaccctaaccaaaatatgtaactaggcagctcattgttaattcagaacatgccactcaacacttcagcagggatgaatttgttctgtgtactctgacttagaagagtatagattcatcattatttgactttttttcttttttttttttttttttttaacacataaaccagataaagagacaaagcacagagaaggagaaggtggacacaggcttcccaagatggcaaaggaacattagcacagggcataactgttccaggagaatgtaatatcatacataatttggaagaaataacaataccgtacttttagtttgtttgtctttgagacagagtctcactctgttgcccaggctggagtgtaatggtgcaatcttggctcactgcaacctccgcctcctgggttcaaatgattctcctgcctcagcttcccaagtagctgggattacaggcacccgccactacgcccagcaaatttttgtatttttagtagagatgggatttcaccatgttggccaagatggtatcaaactcttgaccttgtgatccacacctgccgtggcctcccaaagtgctgggattacagccatgagccaccgtacccggtcccatactttataatctttgaagccatcttctaggctaatctaggccaaatggaaggagaaattaaaagttttctataccagatactgaaccaaacagtttaggtaactaattctgtaagcctcatgccaactctctaaggtaggtaccatttatttttcatttcacaagggaaaacaaattgaggtaatgagcgcttagtcaccagcacaatggtcacactcatagtgactgggaaactgcatggaacccacacctcagaattcatgtgcttatccacatgtaaatatttaaattaattttccctaacactttgcatttctagcgtccagatagtatatagccaatatttgatggtgtttaaatagaaagtcatctgatttctagttactgtataagagagacagaaagagactattagacatcatccactctcatttttgcttattgaagttcattttaaataatgaccaatttttgtttttcatttatctgaaattatgtattaccaaatgtaatgtatatgcatgtaaacatggagaaatttgcccctgacacaagagtatactggaaaaaaattaataaaaaaatcttgggagagaagtatgtacagaagataaaattatgattaagatgaaaaatattaagaaatgaaagtataacaactcatgagttgagactcccctctgcaatggtttgaatatggtttgtctccaccaaaacatgttgaaatttaactgtcagtgtaataagtttggaaggaggagggcttagaggttataagttcaataagatcaatgaatgtctttctcttcagactagatttgttctagtgggactaggttagttattgaaacagtggattgttatacagtgaggttgcccctgtgtcttacctcttttgcattcatgcttcccgttttgctggtccaccatgtgataccactccacccgtttatgaggaaacccaaggccccctccacgtgtggccacctgatcttcaatctcccaacctccataaccatgagatacatctctttcctttataaattacccagtctcaggtaacacagcaacataaaatgaactaggaaacccatcaagtacaaatattaattaatacatattttgttactgaaaattgattatgaaatgggctctatggagttaacttgccctttactatattccttttagacaagtaactatttctgtgagtggatttctatcaagagcaccttgatttcttacattaaaaaaaaatcagccacagtgctggtcttagaattcattaaccatttgaaaaaatacacagcaaaggacttttaattacttggttctatttttcattcaaattccaattaagagccagagatccacttaacaatattcattcccacattatcatcagacatttcttaactctatagtattcattaattaattttttctgtgctcattgcaatgagctaaataacagttatacggagaaaaatacagcaatccttccacctgctcattccattcttctcaaacctaatttattttcacaattcacattttctcctacacgtttctgaatgctcacgaaagcatatatatatgtgtgctatgtatttgtacatatagacgttcacatacctatccaagtactttatcttttcaccaaaatggaatcacgtggcatatgcattcacatagctatgcaaatacttttatttatatttttaccaaaatggaattatgttgcattttttttcactttaatgtaccatgcacatcttctgaggtcaatacacataggactaaaaggaattatttttaatagtactagaacttacgatttttgatgaaaagtacacagcaacatagctaagggtgtgtgtgtgtgtgtgtgtgtgtgtgtagccagggcaaatgattagctaaatatctcaatgtgcctctgatatagttcagatatttctcaacgtgcaagagtgcgtgcgtgtgtgtgcatgtgtgtttagccagggcaaatgattagctaaatatctcaatgtgcctctgatatagttcggatatctgtcaacgtgcaaacctcatgttaaattgtaacccccagtattggaggtagggcctggtaggaggtgactagatcatggtggggcagatttctcatgaatagtttaccaccatcctctcggttgctctcctggacacagcgcaaaagattcaccaaaattgaactgaaaagtgtgtggcacctctcactcctccccttgcttccgcatttgccatgtgttgcgctggctcctcctttgccttctaccatgattggaagcttcccgaggcctcaacagaagccgggcagatgccagtaccacggttcctgtccagcctgcagaactgtgaaccaattacacctattttatcggaaaattacccagtctccggtatttctttatactaatacaagaatggactaatacagcctcacaagtggaatttctcttaatgaagttgcaatggtctattccaacggaatcagaaactagattttctgatgctaagattttcagggttaaatgtatattaagttcacgtaaccaacatataaagacatagtgaaaagttaataaattacagcttataggaattagactacttacattgatacctatactgatatgacagttttattatttttatttaactcactctaggcctgtatgtgaaaccaaattgtaatggaagaatgcctgctcaaacaaggaattcagaacaagaaaaagaaagacataagataactgacaacaatcagataaaagaaaagttgacgcctcaggttaacagaacttgtatcatcaatggacagaagccatctttatcttttcagtagttatgagatttttgacaacttgaagtctatacaatgttctttccagaaaaatagacttacaaaattacgcatataatttcacagcttcatggaaagagatatttcatggccctcaaattaagaaagatggatatatagaatatggacagtctcacagtggaccagaataatcagagttaacaccttaaattcacaaacatcccagggagggttgctcagttgactgcaaccatcagggtgcaactgtgagctggctaagctttcctttccttgaggctgatcctcaatgacacagcttctccttgggctctgtgcttttaactacgctcgtggggctgcccaaaccaattctatcattcattcttttatccgacacattagaagtcacaggtagcacataagcctcgctagattagctaaatttgtttctttagggcagttcagcgtctctcttctaatgacttgattgtcttaaagctgtactttcagaaggcaattatatctctgctatatccctacttttagaaaatgttagtgttcatgtactgacagcactaattcttttaaaaaattattttatcatagcaagaacgcttattatgagatctacccttataacgaatattcagttgcacaagacagcactgttgactatacacgcaatggtgtaccgcggatcccaagaacttacccagtgagtattttccaatgtcatttaacattgattaggggttctaatacagctagtgttcaaaacccctgcaaatggaggacaaacgagagatttcggtagcttctggcaactaagcctagagataactaaggtgaggaccctacttctacttgttatgaaatgaggaaggaatgtgtttacaggaaggatacctgggtttaccagtctaagttacctaattagcccagaggaaagtaattattgaaattttgcatttgtttcaagctctataattgttataaatctacaacaatgttacactatgggctaatggagagccagctgctcttcttgtgctagcacgttcttgaaaaggaaacatttctatcctgccaggtgcatcatgcatgctccatgctttaattcaggtggagtttgggttatcacttcaagggagaaataaatcagtgctgacattctaaataaagctttgagcttgaagagtaataatctagctgctctttctaaatccagatccacaggtgttaaagaaaatcatgcttgagggatgtgtcagagggaaatgccacacatattcagccaacagagtgacaccctggtaagaggaagccccgcccatcctaaatcacttcctgaaacccgaagaaaaggtctctctagcagcccagattcacttttctctggtgaaaattcaaggactgtatagaactgtaggccattttctttcataaaataaatgttcaatggattaataaatactgatccctcattttctgtttgtgaggattaaatttcatatcctatactgagcaatatttttaagaggatctgcttatgcatagtttataagtaataaactacgatccatactatagatcatataatctctttatctttaaatcaattcagtgattttttttaaacttctgcatgcgtgggtgtgttcactagaaagaaaatcaaattcaaatttttcaataccaatacttactggcagtttttctttcaggttttgaggaaatatgaactactagaaaaagttaagttgtggttgagttcagatttttatccaaaaatatttttgagtatgtatcatgtgccaagtgtcaaggattcaaattttccttagagttagttattgccctcaagggtacaaagagtaatggccagagagtaggcatatgaggtgccatctactggcttccattaagtgctctgggaattcagaattcatttaatccatgttctgtcttctccctgcatttattttgggacaatataactatcacttaaaagccaaaatgtgataaattgtcacatagaagcataggcaagcaaaaatgctatccttcgtttcatagtccagtgaaagtaattcagctttttttgcaaaggatctcacggagtaagttttctattgcaaggatgaaataacgtaaactcaattttctacccttcagatagggcagaaaggctcagctccaggctctctgagctccagagaacccaggctcaggatcatccgcctccgctccccactgaactcagcctccatcaactccgcctcacttctgcaccccctcctcctgtaaaccacattgctaagcattctcaaagacaggcatctgtttttctctatgcttctgcagggattcctccttactcaggaagatccttctgttgtctctcttccttgagaccttctattccgggtttgacacaaagtaggcatttagcgcacgtgctttaataacacgctcttcaggtcgtggcctgagcccactctgtgatggcctctacatggcccacgtagacctgctctttcccttgctcttccgccctgttttataaagccggaatgactattgagtcacaccaattacaccagtgttctgtttgattgtttcattctccttcactagtcactgacaataagcagtattcatttcatctttgtattcctgtaacttaactcagtattgtgtctctggtagaggccccgtgaatgctgattaaataaatgagagaagaaatgaatgagcaaatctgtgtatccacttacacttgtgcacgtataagtatggatagcaatgtgtatgagcacacgtgtttacatgtatgtgcatttttgagtatgtatttgtgtatgtgtgtatacgtaaataaacgtaatatatacaagaggaaacagtgagtgtataaggattgcaacttctgtagatgtacagacatgtggataatttctgctttcattccctagcagccatgggatctcgggaaactaaagtactgcagttaactacttcactttctctacgtgataataatagatcaccttatttcacttagacaatttccgtgaagatttcctaagaaaagacatgaataaagtctttgccaattgttatgaaaaattgtgtcctatctgtacaattgccttacactatggagaaaagttctatacaaagcaagtagtgattctagttaataaataccggagtcactgttttgattcagagctgctgctttctatccaaagaaaggttggattatgtacaaaacttctattttccgaaagctactggatcataaagaatacaattaacttccgaaaaaccttgttttacttataaaatgaactaaaaagtcaacctaaattattgcatataattcataaaagctagattttaaaaatataaccaatatttaaattattgaagtccatgtatgatttcccaaatattttagaaaacatttgaaattatattcataataaacacgtgcattaaaattgatatttagactttagaaccaaaataatgaacattttgagtctaagagttttgataatagatgcacgcatttccaacatttagcttacgtttttactaataagggcaactattataaaatagaagaattcctttttaaaatctaaagagaaaaatatataaagtacatcagagagagaggctctttggggaacaatttttagatgaccgtgtatcacccagtccgtatattttcttcaatgtcctcaagtctaatatgtgtcagcctttgtctcatgtcaattttctgacttcctagatgtttttcttaaaacataggtcagcttgatgacaaagtaatattttttaatacttgagattttgataaaagaagaaacattacacaaataaaatttatagacatagtacttcaaaactgggcatatctaggaattttaatagtaatcttattataaactatgtgtaatcctaatagtttctgttattaatttgtcaaagacagctatgcaactatgttggttcacaattaagactaatgtccaagtatagaactagcaagtaaaatcttacaacactgaattaagttactaccttcaattttattctatatttagcagttaaaatgtgttaatttgaatatatacacttaattgctgagacttgctgaggtctatattcagaaagtcaaatactgtaaataatcaatgttagtataaaatttatcagtgttcccactggatttccagagttaaattcaatgactgaacacgttgattacactattttaatttgtttctattctcattatgtagcttaatagttccatgtgtgaataatagtttatgtaaataaagcctattccaaagtactgccagacaacagttgagtttggtgtccggattatgtttattcccaaggttatcatgtttacatagatcttagaactttggaagattcttctcctttcaagccaatacatttcaattaaaattttatgcagcagtctgttaatactaccacaattccatgttttagttaaataaaaaaacatgaatttattataatatgaaagttcattttatatctaaatccagttgcctttatacgtcttggattatacatcagtattttattctattatttgactcataccaattacttggtgggtcaaataacaggatccgtgggcagtctctccaaaataaaaactaatgggaaaagaggaaatctgaggtatcagaaagagaattttgtgactctaaatcaacttgaaacatttttctaattattatcattaattctacttcatatacatatatatacatgtacaaattggtgtatttgcttattttatgcactcttaataaattctgaccttttcccatgacatttccttggaaagtaatagttgtctaaagtttatgtgtaaagtatttggtacttgcaataaatattgctataaaagctctcttctactctagattatcttaccttactcttccacttaagactataattgataatttttctccaaataacgcacactcatttttgcaggagacctggaagctaactgataaatagatttaaacacacacatactaaatactagatacaattttggtttagccaacaaagcacctttttgacaggtttttttcttttaaatagaggtttgtcttcacttgtcaacatcagactataatatcaccatttcaaatcgaaataccacaaaatcattttctacatagccacattaaaaaataaatccaagttactcaacttatggccctattccattttctagaaagtttttcagttgatcttttggagtaacaaagaaatatttttccaacatagacaatcttgccctattttcttcattataccatcatgaccaccagtaaacccagaaatagcccagaaatatttgatagaattattcatatagtgatttctcaacagcgatggagttttcacaacattaattttgggaatctaacaagaccaccttttcagctatcaacttcatcaggaggggagaaaaaaatgccaagttttctaaaatgtggaagcattatctattttctgaacaaatattgtatgttaacaggacaaaatatgcctggcatatagctggtatggattgctttagagatgcttttgtaatattctgcaaaaaatgaaatgatgtgaatttagagtttatatgaagtggtacattgatatcatcaatgatacaatcaaaactgaaagctaataacatccactgatcttcaattagcctgctgctttccaaagattaacttattccttgatagtaacgtacttaaaggtgatagaccctttccagccactgacgctggcttatgcacaaatgcggtggcatgaaagacattagaggcagaatcgcagaccattctcagcattattccacacgtaactttaagcaaaaggataagtcggtccattcctatgtctctgcaaagagaaccttctacactgtaattttctgctaatttcactacagccacccatttgcacaaaccacgtgtatattttaacttcccacaaaatacgatttttgcctaaatgcagagtattcccagtaagaatatataatttgtgacttagtagcaaatgacatcccaagtaaacagtgtgtgttgtaaataggaattggtttacacccctaacgatagattgctttttaaatttacagactccagagtttctgttacagacagtagctcttgtattacgtgtaaaaggcaatttaaaatctccatccaaaacaaaagtagacacacatcggcctttaaagtattaactagttcaatttcttaaaacctaatacttgaaatgataatttccttttccaaagttctatctctgcatttaaaaaaaatttctgccaaaagccgttttaataatgatagcaatacctcaaaggtatctaggcacaaaatctgaagacatgaaaacaaataagtctctatgccttgcatgatcaaacaacagtaaaagcaaattaattttctctcttaaaaatttcagctttgacaacaaaagttcatttaatgaaatttcctttactcaagcactatcagtataattgtccaaccaaaaatttaatgaaactcttctgcattaaaaatgaactctttaccacgtaagagggctattagtttatagtcaaatttctcaaaacttattcgctacaaattaaccaaaacaaaaccccaagaagaaaagttctagtgataagaagaaaattgtgaacacgttttgggctggaaagtttggcgattataacagtgttaccaaatgccattgcattacacagaagccaaatgtctacaccacggaacgacctgcgacatagcagcctagtttgtcattattaatccagtgtagcatgtattagatcatttggacagtgaatgcatgtgcaaaacacaaccaatctcctaccttcatataatgctttgaaaccttgggcactcacagcgaagtctgtcgtgaaccacagagtgaggatagatcctgtactcactatagaggagggcagctgaaatcccgataatctaaatttaaaagacaagacacaaagagagttaaaagcatgaatttgtcaaaaaaagcttatttgatgaagtcactgaataacttgaacagtggtatattcacttgaaatatggcattaaacacttagataatccatacacatagctttggttgttaagtatttgaaattaaacattttcaagtatgagaatatgtttatttaaataacttgagagaatttcttcttgaaaatacttacttatataatatgccattgtcttaaatgctcctcgtttttggatggcaattatctactgccaacttttttttttatttgaatttttaagttatagggtacatgtgcaatatgtgcaggtttattaggtaggtgaaggtgcgtcatggtggtttgctgcacctctcaacccatcacgtcggtatgaagcccagcatgcattatctatttttcctaattcactatttttaatttttttctaataaaaaatatgacaggtaaagcatgtgaatgtgtgtataaacatttgtgcactcaaacatgaaagtattgcaaaaccactgagttggtcgtgaaacaatctgtgtttcagttggattccaagctgtgctcttaggaaaagtgagtgagatggtcaggatagcaaaggccccgtgcaataggctgtgagccgtctagagggcaaaccaatgctgacacagctctgtgatccacaataggactcccaacataagaatgctgagaatacccacattctggtaagtagcttattttttatgttataaaatccacaaactcctgtgctgtgaagcctggtctgtcctctttcaccctcctaggagccctcctccctccctgtcttttggtttatcacctttcttatctggtacaattcacggggatcttcaactctcaaattgtattcatctttgtaaactgcagtatctgctgtctgcttttattttttaattcagtccccttaaagagactcatttgttcattttttcccattggatgccaatccaaacaactttcagacagtgcattcacatgaaggagtaaatgactgatgaatggaaaaagaaaccattgtcataccagaagacactgctttgtactttatgtgttagcgaacgcaatacagaagacaagtcagtgaagcaaacgttgctttaagaaaggaaaaacaaaaaacaaaaaacagtgagtttaaattctcctgtgactgaagaccagcaagaatacagaactcatcaaccctatataacagtatttaatcaatatttatagtacactttacccagcaagaacagagtacacatttctttcaggtgcccacagaacatataccaagataaaccatattcgaggccataaaacaaacctcaaactatataaaataactgaaatcatatagcgtgtgttctctgaccacacagtggaatcaaattagaaatcagtaagataaaaatgacagaaaaatatctaattacttggaaaataaacaacacacttctaaataatccaggggccaaagagaaagtctcaaggaaaataaaaatacagataaactgaatgaaaatataaaatacaacatattaaactttgtaagactcagctaagcagtgctgagaaggtaattagtcgcactaaaaacacagcttagaaaaactcccaaatccctaatccaaattcttattgcaagaactataaaagaaaaaaacaaaaaaaactaaagcaaacagaaagcaaaaaacaagaaaagtacagaaatcaataaaattgaaagaaaaaagaacaaataatgaaagagccagttctttgggaaaataaaattgaaaaagactgactaaataattgggagtttcagaaggtacaaagagtcactgtcattaaacatcaaatattactatgaactcagaattcatcataaagataataaaagttactacagaaactacatatgtaaaattggcaactaagacaatatgggtcactaactcaaacaaatgaactattacaactaaccaatgaaaaaatacataatatgaattatcctatagctattaaaactttccccaaatttccagttccaaatgttcccactggagaattctacatttaaataattaacaccagtcgtacacactttaaagaattaacactaattctacacagtctcttccagaaagtgtaagtggatagaatgcttttgtagtaattttgtggcattgacactaccctttcccttatgggctgaattatgctcctcccaccaattcatatactgaagccccaacccccaacataactagatttggaaatggggctttacagaggtaattatagttaaatgatgtcaaataattcggactctgatcccatagggtaagcatacggtaaaaataagaaaagagaaggattcctttctccctggacacatactgagaaaagaccatgtgagcatggaacaggaaggatgctgtctacaagtcaggaagagagccctcaccaggaactgactattctggaccctgatctcagactttcagactccagaactgtgaaaaaataaacctgtatttcttaatccctggaacttatagtagtttgttatggcagcctaaagagactaagacactctaatatcaaaaccagataaacacagaaaaaagaaaaataaaataatgtctctcatgcatatagatgcaaaaatccttaaccaagtaagagaaaatagaaataggcaagatacgaattatacacgatgatcaaatggtgtttattagaggaatgttagaaaggtccaatctttgaaaattaatccatataatctgcaatattaatgggctaacaaagtaaaatcacaagatcatagtaatctatgtagaaaaaaacatttgacaataataatcattgaacatgagaaaagttctcagtaacatatgattggaaggaatcttctccaacttgacaaagaatatctctacaaaaataaaaaaaatttaaaaaagcctaaagataacattttgcttagtggttgaagactgaatgcttctgcctaagactggaaacaagtcaagaaatttgaacaagtcaagaatgctttgaacattcttattcaatatcgtgctggaatatcctgcaaatacaataatacaagaaaagaaaatatatgcgtatgggtcagataggaataaataaaattactactatttgaagttggcatgatgatctttatagaaaatgccaaggaatctacaagaaaatttgtagagctaatacttgatatcatcaaacgtgcaaggcacataatgaacatacaaaaatctattgtagttctacatactagcaatgaacacgttgacatcaaaatctgaaatacatcaatcacaacagctcaaagaaaagcttctgtataaatacaataagataagcccaacagtgtatacagaaaagtacacaacactgaagaaaaagttcaaagaaatgctaaataaatggacagatataccatgttaatagtatggaagatggaagactcaataatgtaaagatataggttacttccaaactgatacacaggttttacacaatttccaccaaaatcccagcaagaatttttgggtatatagcaagatctttctaaaatttatgtgggaaggcaaacaaacaaaaaaaaatagaatagctcaaacattttgcgagagaagaataaagcaggagaaacagttcacctgatttcaagacttattttatatctacaacggttaagactatttggtatcggcagattggcaaagacataaacccgtatgtcaatggatcagaacaaagaacccaaaaataaacctgaacaaatatctccaatttattttcaacagattcaaaagaaattgcatagaataaaccaacaaattatgatggatcaattggatgtccatagcaaatagtaagtttaacaccttatataaaaattacctcaatgtggattacaaatataaatgtaaaatgtaaagcaattagactcttaggaaaaaaataggggaaaggcttttgagtctagggctagacagagtttctatgcttgacaccaaaattacaaaccagaaaaagataagttaataaattggatttcataaaaattaaaaactttggctgcaaaagaccgcattaagagaataaaagtgtatgctgcagactgggaaaacacattcgcaagccaaatatctgacaaaagacaagtatctagaatataccatgaactctccagactcaacaacaaaaggcaaacaatccaattagaaaataggcaacaagcagaaaagtcaggtgacctaaaggacatccagacggcaaataagcccacgaatatttactctacatcaatagacatcagaggaatgcaaattaaaaccacagagaaataccgcacatgatatttcagccaatcagaatagctgaaataaaaataaataatgacaacatcacatgctggctagaacgtggagaaaattggttgctcttatactgctggtggaaatataaaatggtacagccattttctgtagaaaacagaaaacttccgaagaagtttgacatttcctttaaaaacgaaacacgtaactgccatctgaccaaacaattgttcttctctgcatttgccctagaaatgctcatgatgggaaactgtccctatcttcaccataatgcatcaatattcggttgtgtaattattataccatagttttgccggtggtttccacttgagaaactggtatacagtacacagaaactctttgtataatttcttttaactacatgtgaatctataatgatctcacattaaataattaaatacattggaaaggttgagactgagaggtactcaagaacatattaagattaaaataatctagtaaccaaaataatgctatttaataacaaaacattaaattctaaaagtaagttgaacaaaaactattgaggataatttagtaattgcccatcttgaagttttacatatatattcgcctaagttaggtacaaaataatgtgatagcacttaattaaatacaatttcatgtccctttaaattattaagttttataaaaaattgtgattacgaaggggtgtggtcaaatgatattagttcaggaagtaggaacaagatactaagggatttttaaaacgagtgtcataagactactgttcagaggtttggggtaatttaatatggacgtatgtagggaaaatatatgcatgtgatctgatttcaaatagctgcaatgaaatggattcattcttatttgtgtgccaaaaaaaaaaaaaaaaaatagagtccaacattagttgacagggatgcggaaggatgagtggatccaattgatcataaagagctttcaagagctaaatttgtgattaaatgtttatagccatttactccacactggctgcgagtaaggaatcttataaggagctggcaagactcactccttggtggctcacaaatgtgctcctgaagacatgaaagtacttctgtgagtatcctttccatgagggcccttgcgatacattttattcttgtctgcctcactttgaggaatccctgcttcttataagcaactggcttattttcaacacatagtaaattacgaaacattttgaagtaaaatggattttgaagtaaatcccaataatccacacaggtgtcttgcagtagcaagtcttccttctgtcattcatatttgatggtccagggtagtacgggaatattttagtatatgcaacgttactgataaactttgaatatttcaacaaaatatgacatatgttactccctatcgtaattttttagtgttttacaaaaaatacaagcatgctaaagtatcttcattttagagaggtagacatagcccaaaattaaagaggtatacattaaacattttaaaatgtgttttccaaatctccaagggattatgaaattttactgaagaaaactggccataaataaaaggaattattttgaaaaaaaaaaaaatcttatcgcctatggatgtgacagagagactgacattaatttccagacagcatatacagaggctaggtaatcaggaaatagactggaatctgtgaattaagaagccttttatctatagttaccggacaagttttccagtaaaataacttattttttataagttattccaatttctgttctagaattcatccaaaatttgttgtagatataaaaagtttttttaattatgtagtatatagcatataattttgaaaatcctttttatatattttgtatgtagtatatatagtaaacctttttatatactatatatacaatatcataaacatatactatatagagcatatatagtaaacatacagactacagtttatatatatgacatatatagtaaagtttttatatattttataaagactgtagtattttatactgtataatatataggatatttactatagtatagtatatatacacagtatgtgcagtatagtatatatactataaattatattgtttactatataatatagtaatattttgttattcatattttatagtaatattttattatataatatagtaatatttttattatataatgcagtaatattttattactatatacatttattatacaatatagtaatatagtaatattttatattacaatacagatgatattatataatatagaaatatagtatgtaatattacatgatacatagtatactatattatgtactatattatagcagaattcaaaagtgggaaggggtattagtatcagatgtcaggtgtttcagctttttattttatatagaagagaaattatggtagaagtattcggtcactggataagactggcctggtctagggatggggacaatttagatatcaagaagtgatcagtgatcatgtccccacgagaactggtgtagacggaacagccccagagagcttgggagatcaaagagcacaggtggctgtggctcctgggaggtcaccatccttatagaaagcctctcctgccaggtaggggtggtgaggacagaatctacacaatgggtaagtccagatgggtgtgcagggaccatctaacgattcctgagcccaagagaggcacacgccgtgccctgaatggtcctcagtccaagagatcacttgagttatgtggccttggtgagcaggtcttggtactgttgacaaaatactggatgcagtgagttacatgtcaaactgtgtcaggacacggcagagggtgatctggaaccaggtgctttatcaacccctaggtaccttggggtcatagaactctcttggacttagataccatccggggaagatgcaatcaagcaggcaaagttcagaagagacttaatcaaatacacacacacacacacacacacacatgcacactcaaacacacacagtgaatcatgtgagtatatatacatcttaccagattaaaatgtccgccatcatttggagagagactcgaagtaaaaattattgtaaattccatgtaataattacattatttttatacgttaacttttggcctcagaaaatagtacctattacatttatgtatttttctgttctattcagcatatcactaatttgaaactattaatataaagtatataaatctctcaatagaaacttcaattacagatttttatcacaatgtataacccatacaaatatatgcatgtttaacctattgaataattctttttcttaaaaccctgttgaattttaaagtcagggatcactacttaatataatgtctctagggcacagactgccctttatttaaggcactttatttaaagttatgttttcaaatgtttttctgactccttgctgtgacacctcattggcccagtagtaaagatattccaagtagctactgtacttgaagcctttcattgctattgttaagacatgaaggttacatgtctcgttttcatatcagacaatatcaagagtgaatgggatacatctctgatgcctgttttcctcctctccaaagcacccaccacatctatgtgaatctggcttcacttaaaaggaaaacaaacccatgttcacttgtactgtgtccactgaaccacacattctaaacacaagacaactaggagactatcaacttgatacaaggaaaatcaggacagcttgtaccaagacaactacttcacatctaacgagtcccaacacctttctctatcatctagtacctactagggattaaaagtaattctaggtagcttgttatcttccttgtaagctgtagttcaataggaatacctaaatgatttgctaatgcaatatggaaatggtttttcacattaatttctggagtaaaaaggctgcatgcctggcatatgtgtatctctctctacatgtcagagcaggtatacacacagaagtatgttaacatgtattttcctacaataaacttgcaacttaccttatgacactttcagtaatactagatgtgctcaagttcctttaggaaacacggaaactacagaacttttagggcttattaaaatagctgataatgtcatattaataatccagggttcattttaaatttggttattttgtgtattatttatttatttattgagaaggagtctagctttgtcgcccaggctggagtgcagtggcgtgatcttggctcactgcaacctccacctcccaggttgaaggattctcctgcctcagcctcctgagtatctgggattacaggcaccaccacgtccagctaatttttgcatttttaacagagacagggtttcaccatttggccaggctggtctcagattcctgacttgaagtgatccacctgcctcatcctcccaaagtgctgggaatataggcataaggcactgcacgtcggccttatcttaggtatttttttaataagagttttacatacttacagtgtacaatacaatgtctcagtatatatgtccatcataaaatgattactactggtaatcagtttttttctatgaaaactgatatataattggattattatatataatatatatttatataattggatagaattctaaaaggatcatgcctgccttacacgaatatctggttatgttttaaaaacatcatgagatttcaacagtcctatcacttcttgttgaagagaataatttctcatcaattttgcttcactgctcttcaagagctttacatgtgtatatgtgtgtatacatagatatacacacattttacacacacacatctacatatacaaactatatcggacaaagaaaaagcatcctcctttcacacaatgttttgtgaacagtggctcagtttggttctttggcaactcctcctgtcaattgggaaacagattagcttatataatttgtagaattcaagttggatcagaaaattgcaaaagcgtgagactcattacagaaggatttggtccatactgatttaggaggcaaagaaagtcaaagtttagagactattccagagagagaaacgaatgcacagaggagggcccttcatgctgggtaccccaagagatggaccccaataccccaaaagaacaggagctccatgagggcagaagtgggtctcctgtaacccacagccgtatgctgagattctagaagtgctccacccgtatttgttgaaatataccggcaatcccctcccatcatacccaggatctcattggctcgggaagaaatccacgcccattcagttaagttctatgaaatgagggaatcctctcctccatttttggccaagacttggggattcaatcagtggtcacccatcagggaatgaaaaagacaagaggcaaaggggagaatccactggaagctgagctggaagatgaggtctccttaagtgccttcccactgaaatgaaatcgactgcctgagttttcagaatcaaccaggaagtataaaagcagaaacaaaacttaatgtttaaatcccagaagtgaggtttataaataaagctaaatgtgctgattccacaaagcaaatctatgtcagaatctatcctacgtgtgctttcctaagcaaggtgcccctttatctcaggagttaggccccagctttctcatgccatgaatactgggtcggagaagaaattttctaaaatcacatcttatgttttggtgctgaaaaaatattgcagttaaaccactgcatattgctttaactgatagttttccttcctaaaaggcttacatcattaaaggcttatcagtttattcaaatatatcattgtttacctcatggttatgacatagtctaccttctcccgggaccctgagaggaatttcatttggttatggtgatttaatagacatggtatatcataatttgcactaaacaaaaatttcctcctaagaaattacactctgatagacactactctctaataaaagttactctggggaagaaaataaattttccccaaattgcattctagacaagtttgtcaagaattcaactgatcctcttttttttaatcaatgcaccaagttattttgggcaagttataattacagtgtctgtaatagactatcggaaacaaaaaatctaaagagattttgcccccaagcatgaaacagcatccacataatgtatgtttatgacaatcaaaccatttacaaatgacattaaaacagtaacagcgtttttcctgtcaattgtcactgcaaatacttcactccagtgttgtcccctccactctttgccttctgtgtgatcagcaccagcttctcctgaatggtaaggatccataaattatcttaacagtgtaaaattcactactagaatttttatatcaagatgtcctttcaatcttttctcccctcagttatgccacttttctctggaaagacttcgcataagacctgtgcttcttcagaataactcgtggagtgtccattttattttcttctatgatcattagtgttaatatatttaatcttaaacagaccacatgactgtagaaaaagaggtgaggctctaaatgatttgctcaaaggcaagggaggggagtaggtagtgacccctagagtttattccaggtctgttttcattatctcaacaacattaaaaaaatagtgaaatggctcaaagatgttaaataataatatgcaaatttattttatcatatctcacaaactgtatttttacttcgtgattttcttaagggtgaacctaacgtctataaaattgaaaccaatagttgggaggaattcattgcacttagaaccatacgcacaaacttagattgaaggaggaacaaggtgagaggagagcgagtgagcacacagtcaggagaggagggcagagagagaagaaagtagagagaccaagtagagaccaattgctactcagttacactttataacacccgaccctgataatctacaccagccccggccccatttcaaaactttgctctgaggctacctctttgtggcaaaaaccaaaaccaaaacgaaaaacagacaaacaaaaaacagaggctaactggaaaggaagaaaagatagaggaatgaaacaaaagaatcctaaatcctgacagcagaattaagacaatggaatcaattgttgttctaacaattttgaaaccaaacttcagtaacctggcatgtattagaaatgtagcaaatgcttaataagttggtaacatacacatccaagataaagtactacgaaatgtgggcctattttcttggtggaataaaatttattatatatactattaaaatatgtgaatgatatgtaacaattgggtaaatgggaattacttcaaataaacacagtattgttttaaaagccacggcagtaacttacatttatgcacttcattatatttgtcaatgtattctcaaaaggcctgcaaaaatgtgtaaggagatttggtagtgctcacagactaaaacagacaggattagaatacagaaatattggctattgagttcaaaaaggtgattatataaaataaatccttgctaaagcatgcatggattataaaaacatgattggcaattatattgcgaagtttgaaaaagtaaaattggaatttaaaaattttgtcaaatgggttatgagaaaacagtaaactcacacaggaacttaactgttttccaggtgtaggtttttatgaggcaagagcccagagactaggcagcttaagtaacttactcaaaggactgcttgtagaatccccttccctggctatgaacttagtgattaacctacactaaggcaggtttcatgttatgttgatttcctagatttggagcctggtgaaaagaaatggactaatgacacaaaaactcaagtatcaattaccctccttggggtgtctactaactgctggtaaatgctcggagtgtgaaaacactgtattctcacaacatccataaaacacccttatgacttaaagacaggcagtaaagctcactccttttgcaggtgaggaaacgaagcctcagagatccttaataactgacttaagaccatgcaggtggagagcaggagagacaagattcaaaccctggcgtctctctccagagcctgtgcttttaactcctgaaagttcacaggagatttcaaaccagggccatagaggaaataaaaatatatgaagccaagcagtaattttggttattgattagaaaccaaccaacaatttagatttctttagcactctgttgtataccaagggtctccaaccgcgagccacgaatgtggctgcccatcaaggggtgagcagcagaagccagagaggctgtgttgttttcacagctgctccccatggctcacgttaccagctgagctccaccctcctgtcagatcagtgggagcattacattcccacaggagcgtcaacactgtcgtgaactacgtatatgagggatcgaggttgcacactctttataactatccaatgcctgatgatctgtcattgtctcccatcacctccagatgggactgaccagttgcagaaaaacaagctcagagctcccactgattctgcattatggcgagttgtataactatttcgttgtgtattacaatataataatattacaaataaagtgcattataaatgtactacatttgaatgaccccgaaaccatttcctcccacaccctggtccgtagaaaaactggcttccacgaaactggtccctggcaccagaaaggttggggactgctattatatacaactcataatatcatggacatgacatcattacataaatttctactaaaagaatcaacctttgaaccaggaatagggcacattaaaggcaattccctgcgaggtcaacgcactggctatctgcaagcgcggccaagtgtttccctcattcccaaggcagccccagatccccctgccggcaagaaaaaccttgtggaagcagacatgtgctgcaacagagagatgaaaagcgcccttaaaatgggaaacgacaaatttgataaagccagttttctttatgctcaaatctgcccttgtctgaaagagctacactctcccacttgcagtcattcacctggcatgtgaatatataaaattcccatcttttgattgaaaaataacatttatttcctacacctttatgaatttatagatggagtttaaaatttgtgtctatttacctctgtcctttgcaagatacttttaatgaatctggaaaaaaagggaaaaaagactggaatctaaagcacacaggcacagccccatttctttgacaatcctacaaaagtcaggataagaacacagcaaaaaagggggaaacttgtagaattgaggtttattcactgtgggctccaggaagtgattttctcttcagcctcaagattaacagcttcaattcttttcaaagatatgacaaggaattttaaatatctggatctaggggctggacattgggactcacgcctgtgatcccagcactttgggaggttgaagtgggcagatcacttcaggtcaggagtttgagaacagcttggccaacatggtgaaaaccagtctctactaaaaatacagaaattatccaggcatggtaatgagcacctgtaatcccagctaattccatagggtgtggctgtaaaagctactcaggaggctgaggcaagagaattgcttgaaccttggagatggaggttgcagtgagctgagattgcaccattacactccagcctgggcaacagcatgagactgtctctaactaactaactggatctaagaacactaaatctgagtgtttggcagcacaagccactttttgaactcagcccttggctttgtgacccatcctatgaagtccccacactctaacagaaggaaagaaacaacaaaaagaaaacccagcaaaattgtctgatgaagcacttaagagcagcccaacattgactaaaacacaatagaggaggaggaagttcatgttacagtcaatgaagctaatccaaaatttccacccaattaaagacagagtaacaactgggaagacatatcacaaacccgatttactttttgactggaaaggaacaaagagtaacaaatgttttcatgcccctgacagtgctcatccggtgattttgggacttagctcttagactgtcaaatacacaccctttccacactccagaccctgcaccgcccatgaagccctacttcaccagggctcaaccatccatagctgtctcctgggcaaccgcaagaacaaactacatctttttcctcaagaaaatgctgtattttgtcagcacatgactctgcatgacaaagtgacaacagatgttaaaaccaattatttcctatagaaaaaatgatgtaatctaactcatattttgcatacttttgtctactcttggagacatttaagaagccaatactgttgaatgtctaatatagtttgtgtgtaatatatcggtgtaataaaaatggaagccattaacagtagatgctaaaaataaggaaaaactgtattttaaagtatcagtaatatattatttttataaatataacaatttcaatagggaatataaattgatacacaagtacatcagccaatctgatctttggaaaattaaaccttgaaaaaaatgtatgttttataagtactttgttaatccacctactgttcacaaatgattgttccacagccaaatgtgacacaggtaaaatgcaggattatggagttttgaggccttatttaattattaggagaaaactcagagttcctgcagtgtgatatcactccaaagaagtcaccatgcaggcccagagtttgtctagttttgttaaacttatcactggtttccacagaaaatctttggaagccctgttatgatatgatttgtccaggaaaactgaaaccttaactgcctgcctccttcaacactcaaaacattttcctatggctgtcatgctcccttccaggaatcatggaatctgctcttcacggcacatgagtgaatggtggaagctagcctaccacctccctgggggaaggggatttcctgtgaggtcacccgagttgttactgacaagtggaggtgcctctgtgtggggctgtggctgccttgagatctgtcttggccatgtggctacaataaaaagtaccatacctttgacagctaaacaagacaatagaagacagaccgtgtcccgaacaccttcagggcagggtgtgtgactccaaagctcaccttccaagtattaggactgtgtgaccctgagagtggagtgtgtgtcaaatgtagatttgacggaaaataattagaattttaaccaaaatctacattcttagcctttacatccacacatcaccatctacttttctgtcacaaacatattgaattaacttcatacgcagcagcttgttaaaatataagacccaatcaagatcattcacagatcttataattccaagtttcaagaataaaaccaacatgtccaactgagctaaatatattcttcatttcagcataaaaaatagaagtcatagatattgagagagttagatttcagtgtctcatcttacagacactggctttaggcttcttatgcctcatattaacttattgtaggacaaaattagttcatacttaaataaaaatattttaatacccaccttgtattgtggtgtttttttcatcttatctgtttttgtcactataaaaggatactgtcaatctctccttcttgtggagattaattgcctgatttatacatcaaacgtgcttaagtctgtttcaatttttgtgtgtacagagtagatgtgtgtatttgtggggtacatggcatgttttgattcagaaatgcaatgcataataatcacctcaggttgaggggtatctctcctctcaaacatttatccttcaagtaacaaacaatccgatcacactgtaagttattttaaaattgacagttactgttgattatatccatcctgctgtgcaagcaaataggtcttattccttcttctattttttttaatccattaacaatcaccacctccttccttcactcctactaccctacacagcttctggtaaccatcctactccctatgtccatgagtttaattgttttgatttttagatcccacaaataagtgatcatgtgatatttctctttcagtgcctaccttatttcatttaacaatgatctccagctctagccatgttggtgcaaatgagtgaatctcatcctttttgtggctgaagagtactccattgtgtttaagaaccacattttctttatccattcatctgttgatggacactgaggttgcttccaaatcttacctagagtgtacagtgctgcaatttgaatttcttgctcagctttctaggactatcctgattctctctatccctgagattgagactcagtgctttttcctcaaggtaatttaatgggacaggctatggaagaacaaatttccgaaaaaatgaatcctacagttgctacccaaaagaattcttttaggggaattttagaaatggcaaatccaatccaacaaaacaaagcaaaactttgttgtctcaacaaatcaaatcaatgactgaccaatgtatcaaattgaagaactggttctgaaattaggcagtagagaaaagtaaacttccttttaagtaactgaaatatgattatttagtttgagagaaaaaaaataagcttgttttaaaaagaaaatacattttaaggtattgctaacatccttgtatgtgaacaacttactgtaatcatgactagcaaagtgagccacattttctagtcatgattatccgtaaaatcagaaacattcaccaaaagttaattacatgaaaagtttcctctcaagatttttataacatagccgcgtatgtatttttgtcatttatttcatatttatattacagtttctgcagatatcttgagcagactatcaggtttaaaatgtttttatttcatactctatcagcctctgttcaccaagcctttccagatcccagagtcacacaaaggagttcgtagagtttaacctaatatttataagacctttagcatagaataagattctactatcttatatacttgcttaggctgccaatgagttccatgtttgtggtgtgaagacagagatctttgagttgtctctatgggaacttcataggccgtgtttggttgatgggcttgtctgtaaaactgtgcaggtctgcccctagttcacctgcctcactggtgtagaattcaagtggtctcacctgagaagccggctctcaggcttggacatcaacctgcttaaagtaattctctaagtgttttccatgtattttctcataaatgttgacagaaacccaataaagtggtctgatctgcatttaaaagggggcatggaatacttccaagcctcttagctatgaaggaacagccaatattcacactcagcttctttggtttccaagttcctgctgtttctagcacactacgctgcactcagaaaagaattgagtgtgcttcctgatttagatattgctgacttcttaaaaaactcataaacattgagatcgatctgcaagaaactcctgaaataatctcaacccaagccgtcttgtttttagagtgcagttctttaaggttgaagagacctggggctttcctgaatgctcatggaggtggtgtctgaagcagcaccaaatctccagtctctgaactctgtcctgcatcacccctttctcactggagcatgcagcttaattataaatacagttgaagttggtggatacttaaactctacccatccacatgacgctgaatgttaactgggacatgtggcaatggaccaacgcttgggttccacagcacctggctgtaggaagatgcaggtggaagtcccactcctttcacatgttttactttccatctctaagctgacgggagtgtggggagccctgcacagtcacattgtgctgaatcatgctcctattattttatacctacattatcccatggagtagtatttacttggaattcctgcaggtagagccacttatgcaaactcttgcggccttcatactcagttgagattacctgcagttacctgcaaatatttggttacaaatgagtccaaaccatgtgccctgaatcacaagtgcttgaaggatcaaaagatttgcttattattcaagatctaattctcaaaattgaaaggtgtattatctgaatctgtatcacgttcccttgaaagcattagattaccaaagaccaacggagtttaagtatgcataagtaacaatatatggtgtaggattccgtaaatgaattaatgtgaagtcatgagcgcttcatcagtcctagacgtttggggcaaattttcatttcagaactgaataataaactatattctttttagtaatcttagctgatataggtcttattggcgccatcctatttcatctgtattatatggttcacactaatcaatcaaatcaattaatcatctatatcaccttgttactgctgtggtaaagattatttcaattaagtaaatgagccattttattaaacacattgcaaatttcatttatttgaaatactttatatgaaatatattgcttctattaaacaaattaaacaactactaaattgaaaatgacctttcactgctgccaaaattaccttggtaatcaatacgttaaatataattattcaaaattaaagaaattgtgagatattactatacaactttgtgggttactaacttatttcacgtacgtttattacttaatatttaataatgtaatgattttcatctaactttttcctaacattcttatgttttcctactttcttccgtttgacgaacaagctgagatagctatatacatatatgcatacatttgaaaatgtatatttgaagtatgagtttactatctgctgaaaatacatatttctttattattaacatacttacatatttgttttaaggtaaagtaaaacagcaccataaggcaaaatggaagttggtaggagtgcgtactatgaaaatgtgtgcttattaaaggcagggtttaaatttagttaggttttgaaataagtaaatagagaacataaatcagttttgtgttactaatggagaatcctaagcctacaaatagtgactttgagaagagatgtaaattcaggggtgaaaattaaaggcactaatacagaaggcagcttcgaaagataggatggtgtaatgagatcccaaaagagaatcaactacacaacagttaacaagcttaataaggagtaataatatatgtttacagtttccacacatgaattaagatcctggcctgcacacttcaccagcctagacatggggggtatacacttaattttcctaagagttaagaagcttaatatatctaaaatagcagtgatcaacagtttaaaacactgtttttaactgtgttaggatattggaaaagaggaactcattctctttaaagtgcagctttggtgtaaatttcttgctaatttggacgtttctttctagattaataatgtagaaatcttttgatccagcaaccttttgaaatatgccctacctatatgtgcatgtgcacctatacatattgtatatatttataagatgctcacagcattggtactataaccagaaaaatggaatcagctggaaagtctattaactgggaagcatgtaaataaatcattacatatttatgcaattatacaatgaataaggagtcagaggattgctctcactcacacctatatctaattatcccttttcccccagcacaaaatcattgttcatcttgttactcacaaaaaaaaatctcagcaactgttctcatttccctctataatttctatggatataaagacatgtacagataacattgctgacatgcatatctatatgtaattttcaaagatgcaaaaccaactttagcattttctctggaaagataggtagtaccatgcaatgatagggaagaaaaattgattgcatacatttgtgctgcttgagaattttatcacatcaatgtattattttacaaattaattaattctggccgggtgtggtggttcatgcctataatcccagcattttgggaggccagtgcgagcagatcacctgaggtcagcagttcgggaccagcctggctaacatgctcaaacctcctctctactgaaaatacaaaaacttagctgggagtgggggtgaatgcctatagtcccagctacttgggagactgaggcatgagaatcacttgaacccgggaggcggaggttgcagcgagccgagatcatgccactgcacttcagcctagatgacacagtgagactctatctcaaaaaaaaaaaattaaaaatattaatgaaaatatatacatctattatcattttaaaatataaacttttttcctaataatttgactcgttaatcaaaaggtttttttttttttttttttttttaagagatagggtctctgtcacctaagctagagtgcagtggtacaaccttggttcactgcagtctcaaactcctgggatcaagcaatcctcgcacgtcagcctcttgagtagctggaactacaggcctgagcactacactcagttttttttttttttttttttttggtggggggagtagagagggaggtctcactctgccccctaggctagttttaaacagctggccccaagcaatcctcctgtctgagcctcctaaagtgctgtaatcacaggcatgagccaactcacccagccccagaagtcatctttaagattactttcttaaaatgaaatcagtgttgaatgttttattaggagttagacataaggtattttacagagagagaatgcattataaataactttcaattttcatgtgcaaaacatagaagcacatgaaagcctatctcatctatgcaaacattttatgttcaatacatttgataatgctgaagttcttcaccacctaggtatttaattttatttcacagaaaagtcacatttttttctaaaatatttacaggtatctttcaaataccaattaaaacgtttgaggtacaggagataaatgaaaatttttacttaaatattgcattgcagtccatttgactgactaatcttgggtgtatcacaagataaatcaaataaggttcaatcaaacactgaagtttgagtaataaaagcatgaacgaaaattccagaaagatttgagttattttaaagtatgctgctacaattttaggaaattcctttataaatcttatcagcttcttacataaccattgtactgagaaactcaggggccaaatgttccgaaaaccaaataataaaaggtagacttgccctgagtcatttctatgtccccccgcttttttctaagaggtctggaaacccattttgtttcaaaactgctcagagtttgagttgtagaaacacgtgacgaaatgcttatctcctcccactcttatctcctgtcctgattcagcaaaaacatctgaaacacagcttcaaatgcaggcaaagtgacaatctcctgacaaatctttatagcagacatgatgtcatacacagtgcagtgatggctgtttattaatctttaaaattttgtttttataacagtaaaaaaattattaaaagttagaaaagaaatgaacacaaagtataaagtagaagttctccttccaaactatcccattcccacacgtttgcctagagatttctaccattaacaaagcctacgtttccagtccccactgtatatatgaacatataaagcccagttctataaatacatctacttacatgcttatctacaagcatattacatctgttatgtatataaaagatgttattccttatgtctgtttacctgaagaacctctcaaaccatatgcaactaaagagattttatcttgtttcacttatagctcttccccaaattggctagaaaaacagaagcaagccctctggattgctggggattccagagtacttttaaaacttcattgactttcccttattcaatgtctccgaaaaggtagttccccgaaatgtgtatttgttgataatacaatcagtcactattttatgtttgcatataatccaaagacagtaatggtctgtgataacttacaatttttaaaatttgatttctaaaactgaaatatgtaagttgcctttatttacatgatttgagatgggactgtaaattaatgagattgcttgtttacagtgaacagatgtttatgtttatataaacataaatgatatttgtccctcaacgtaatgtatctacagcaccacaggtatctccaaaatagtgtcattgctttaactcttccatctcccaaaaacactgtctactttaaagatttcgattgtaattgtgaatatacaattatttgagaagagtcagaggtggtatctgcctttactttctgaatataaaagggctgtaaaaagtggtagctggtatagcaacagtatcttattcctccttttaaatggtagaattcttacagtgatatattactgagtatacaagaggtgttcaatttttatttgtaattaatgtgttttaagatggataatgtcaaatcatcagcatcaatcaatcttcgcctaagttttgtattcgctagaaaataaacttaacttattttagagaaagtctacccacaatatgcatacacactggtctttgaaacaacggctttgataacaaaggcaacaaaacacagttccaagaaaattgcaacaatctttattcattattcaacaacactgaattgtatgatgcaatcaagatttatcttttcatcttatgtgtttctttatatgccacatatattaacaccagaatacagtatagaatttcacgaatgatatgtcagccacgtgtggctcaagacacatgaataatatgcatttgcttaaaatataaagaaaacttcgcattcaaagaatgtactggaacagccatgccgttgacgtgcagttaaagaaatagcatttataccattcaatcctgcaattcccaacaaaattctagcagcagttggctaaagatgatccaaaatatgaacagttttatcaaactataaacacattctatctctaccaagtgtgatctgtgtcatgtccagaaaatcccttatatggtgatcacagtgttagtaacgaacttctgggtaacaaagttgacatgtgaaaacactcagctatgttttcatttcatcacatctacaggagtcctcataagaaatgcgtacatatacatgcatatattcgtgtgtgatataattacctgtgatatgaggtgaaaatgtacaaacggagtaagaatggtgacatgttaaggaaggaaaacacacactatctttgagaagagtaagatagaggtggcctggcacagtagctcatgcctgtaaccccagcactttgggaggtcgaggcaggtcgatcacttcaggtcagaaatttgagaccactctggccaacatggcaaaaccctgtgcctactaaaaatataaaaactagccaggcatggtggcacagacctgtgatcccaactactcgggaggctgaggcaggagaattgcttgaacctgggctgggaggtggacgttgcagtgaactgagatctcgcgacttcactcaagcctgggctacagagtgagactccatctcaaaaaaaaaaaaaaaaaaaaaaaaaaaaaagcagaggttcttggagtaggtcatgctgaatgtggtgctcaaaaatggacaacttttagatcaacagcatgtgagaaaaccacctgaggaagacataagcagtcgcattcaattaggatatattttgacagacaagtttttttagccacggagaacaataatgtccatcttttaggggttttctaagaattaaagcagctccagaacatgaaatgctgagcattctgcacaagggatagatgccatctgtaaacatggttattatcattcagggcatgattgtaattgtgatgacatgttgaaaacatcaaaaagcagggtcactctaagcacaggtgcatgaaggaaaataatgaggtaaaatgatatgaatatgtctacctaattttccctgatttgactaagaacatattattccagataatcagatgcttgtgacctcagccacaagccttcaggtgcaaatgacaacccagaggactcctgctgcagccaaggtaattgattgttcagactctgaccttgtccaggtcttacatatttgctcccttcttcatttacataaaataactgggaaatctccactgtgttaaagaaatgttatttcccttctcttgcatttgattttcaggtgttaaaatgaaaacctatacccatattgaaatcactgcacatttatgcactcatacaaaactacatgtttaacatgttacttctctgaacaacaaaaaaagtatgactggatagtagatacagtgctgttttaagattgggtgatggcactagaagaatctgacaccttttttttaatgtgcagaatcctggttaagactactttcttcattgtttgaccattatttttctcttgttctctttctagccatatgttctctgtcattacctatgacattccgttagttatatctgcctcattaaatcaaccattttctgtatacttcagaagtgtatgaagtcttttccttaatatctcatttgaggagctcaacaaattctatgcttttggattattctaatactatttcttactgtaccaaatcgtctttcaaaatttataccctccagtgagtcacttaagaaagtcaaagtctttgctttcataaagccaattttatacttcattggttttgttttcatttgggtagcttgtgtgataaaaatggcttcaatgaattgaaataatacgctggtgtttaagaaagaactgtgtgttcagagtcgaactgggccaggcatgtgttcctaggaaagtaaggttattgaagccactagagaacattacattgtcactttcccacaacttggaaggaatttctatttgggggcgtaacgttgcattaagtatccaataatagacggtcctgagaatctacactaagaaatcacagaaatgtgtcagaaatagatgattaacgagaatgtttaaattgcctacttagtaattaacatcttcaatgcagaagtgttctcccgctggagaagggcacaagaggagagagcacggatgcagggacgtgacctgggcctttcagctggtcagagaaaaagtatttcggtgttgaggtagacgaaaggatagcaacaatgtcagtgcctcttccctggcagcaccctgactctgtgccaactcttaggaacttgacacagcccaagaagaggagacgaggctgtttcataggcggaagggctccgtgttcactgtagacagcaagttgtgattttgttgttacattcgttacatacgtgagttttgaactgaaacccatacttcataaatgacgcatcaaagaaacaaaagacattttgttttttccacaatcatctatttctaggatacctttgggacagaagatcacttgaagagtggacccagctgggagtggtggctcatgcccgtaatcctgcttctttgggagcccagcatgggtggatcgcttgagcccaggagtttgaaaccagcctgggcaacatggcagaaccccaactccataaaaacaaacaaaagtagccatgggtggtggtgcacacctgtagtccccgctactcaggtggctgaggtgggacgatcaccgaacttgggagactgaggctgcagggatctgtgatcaggccactgcactccagcctgggcagcagaatgagaccccggttctgctttgttttgttttgttgtggggaagatggagtctcattctgtcacccaggctgcagtgcagcagcgcgatctcagctcactgcaaactctgcctcctagatttgagccattctctgtctcagtctcctgagtagctgcgattactcgtgcccaccaccatgcctgagttgtgtgtgtgtgtgtctgtgtgtgtgtgtgtgtgtgtctgtgtgtgtgtgtgtgtgtgtgtgtgtgtgtgtgtgtgtgtatttttagtagagccaagttttctccatcttggccagactggtcttgaactcctgaccttgtgatccacccgccttggcctcccaatgttctgggattacaggcgtgagccattgcgcctggcagagaccgtgtttatttaaaaaaaaaaaaaacattggccctacaaaaacagcaggagatgactgggtggagtggtaagaaactgttgcatggaagggattgtggagttaacaaaaaggatcatcagcctgtgtcaggtctgcgagcctagcctcagttatgacagcgtctctttgggaaaaggtacttacttaaatgtacatttgcaaatagaatgttaaagacaaacaacattttaataaattattgatcccatgttatttcccaattattatggataagggaaaacaaatatacatgacaaagttcttgcctgatggatgcttacgttatagcaggttagatacaactaaagcaaatcaaagtctgaggcagaccgtgatcattattattacaatgaattatcagaatgtggtcattcaaaatgctatacaagttaagaggaaatagaaatccctttcagctccttgaatgattgggaaaggaagcctgaagtggatggcatttgtctggacccagaggaaggagtagaatttatattattcatagacagtaaacaaaatctttaaatctaagatgtgaatgttctttggagaggctctaatccaaatccctcactctacagataacagagtaacactacaaataccaatgctctgtcaacagaaaacgctttcatgtaatacttcccacttgactaagcttgttcaaagtcgacaggtttacggaaaaggaaggaatggtttccacactctcctgtgacctcttgttttagaaagtgcactcatagttaataaaaccaaaattaagtctccaaattaagatttaagactcttttgcagttatgtatcaagtgttataaaaggagaagaaaataaacgaacacaactaagaagtcacaacgtttcaaagatttaagtgataaacttaaaaaagtgtaagtagaggaggctcgacgaatgtacaattttattgttcgattactcatctttcggaaatgacgacaattaccacactcaccatattttttaaaagacaatgctaatagtaccaaaaagcctcttggaaatttttgccaggggcaggtggtaaaactaaaaaactaaagtggttccgcatgaggtttcctggaatatcacccctaagcttagctgtccagtggaaattctgttcccttctctatgttcttgatctcttcctagttctcacttttaccaatgtgtatcgctcgtatcacctcaaggtgaacatgtaaccataatgtctatttttaaaagttttttaacactgaaaatatttttcatctttattcaggtgaaggaatcaaaagcccatttagcaaagcatttccaaatatagttataacacaaaaaagggtacattttgtttgccgatctaggaggatttttaatttaaaaagccttctgcactaactcaattaacagggaataaaacacgccagttgtccaactcctactttcagtaaccctgtgtgccctgatgcagattggaagacattttcactgtggagctattttcccttaaatactttcccagacaacagcagaaaggaagctcagtcattttaagttcagattagtacataagtttacataaatcatgggaacatcctttgaaatctaacatttttccttcctgtattgtgcaattttaaagtcttagtatcaattaataaatgtaatggtgggaaaatataatttattcaccaacatatgtcaacatctgactttcttctcagtaggaaaggtcatatatcttttttggcattgcccatttcatcttaatttcacttttgaatttttctgaatgacataatgacaaccatatttaaggctttaaatgatgtcatctgcagaaggagacagaaacctaattctgggacagggtaaaaggtaatttctctatcttctttctgatgtgtatccaattctcttattcaccaagtaaacacacacatgcacacatatttcatctattaagttcaaaatttccagataaattaccagtgtacctgtttctcttctggatcctaaggtacaaatggatagtagtcagtattatttattacttgtgtgcgttcagcctaatttatggttcttgagtaaaaggcccacagaaggatgctataaacctctttctaaggagattgaatagcttaagagatttgcaaaaataaaacaagctaatgaagtctaaccagactttgcaaatatttagcaatatagatcactcaaaagcaagtacattcttctacaatacagttttacttctattttctcagaataattacactgtctatgcttattcacactcaggttgtaactattgaaaggaaactcagaaatgttttaccaggagcagatgaaaagactcaaatgagcatctgtcttcattggttttaagcctccccctctctttttttccagaatgattctggtgtataacataagagatactgtggctatgtttagaatagccgtgtagaagttcatatttttccccaatttttgttgataattcagttattaaaaccatcatccttcagtgtaatatgaagttacttgtcattttttgtctttaggctgtgtctgtgagtcacaggaagttggatcccaatggactcatctaattatttagccattcccataatagagataatcaatattcactgctgtagccagaatacatcttggagcaatccacatagatcatgaacataatcagcctgagaggaatgggatgggaagagagggagagagagggagtatggggaagaaatgccagaatagggtcgggtgtagaaagagaaacaatggtggcaagcagttgggagcagctatgtttgggcatttttacataacagagccctgcaagcttcccctcctacgttccctatctcagtaaatgacttcatcctcacccagtttctttacttagcaatctcaacctccataacatatgtataaaacctgggcaccatgcccaatacacagaagatgctcaattttgctctttttcttgtttttccacattctgcctttcactggccctgtcctagccatctctcctgctatggcctgggtgtcctgtccttgatgactgggttccacttttctcccggaccaaggacttcctcgtcctgtctcacttctgctcaatttatcctgtacaccagcacttctttgtccattgttttccaaattacaaccccaaaatggttgatatacgtagagtaaaaccgaactgggcaacaattgaagttacagagtacctatatgtgagggagactaagatgaaagcaaagagacagtgtctgatcttcaggagcacacaacatgggagaaagctgtgcactgtttgctgcaactcagagtattttttctttgtttttttaaagatatttagtagccgggtgtggtggctcacacctgtaatcccagcactttggaaggctgaggcaggcggatcagcaggtcaagaaatggagaccatcttggccaacagggtgaaacctcatctctactgaaaatacaaaattgacaaaaattatctgcgtgtggtggtgcgggcctgtagtgccagctacttgggaggctgaggcacgggattcacttgaacccgggaggcagaggttgcagcccagatcgcaccactgcactccagcctggtaacagagtgacactcagtctccaaagaaaaaaaaatttggtactttgatgcagtatccactgtcttgcactgtatccaatgtataacacatcacagagttttaataaatgtcaaacatttaacagaatagcaacaaaacagcggtctcttcacaaattgaaagcaagtattgtattttcattttgctttcatttacgagaggcataaacatactgcacttgtgagtaagggtggtggatgtgagaggaacaattgttaatattcttccaaccagattgcgctaatataaaaattaaaattaaatcatggagaggaaagggccaataaaagaacccatacaactaagatctacagtaacgtattatatttgggtactgaattgacagctaagctttctgttgaccaacgtggggaaaaaaaaaatggaatttagtgaattctgcactgctcattcaataagtcagtcaagcactttgggaggccaaggcaggaggattactcctgagttcaagagatccagactagcctgggcaacacagtaagaccctgtctctatcaaaataatataaaaataaccaagtgtgatgaggcatgtgcctgtagtctcaactacttgggaggctaaggagggaagatggcttgagcccaggaggtccaggcggcagtgatccaaccaatcatgactccatcaatcaaccactgcaccactccagcctgggcaacaaagcaagaccctgactcaaaataataaggcaatcacaagtgtttatggaagataattattgaacatgtgctatgatcagtgttttccacactgaaaaagtggtcagaaaagcttatcactctcatcaagtcccactctcctaaagcttacccatagagaaatattaaacaagttttcttatcacaaaaattccagagacagtgactctggaaaggtaaagggtgagcgatagagtgaagacaaagaaagccttaaaaagaagaccattttagaggttatattcaagaaggaatctactagaaggtaatgttaggatacattccttagtcaattgagttcactgatgaccatgaaatatcagttcttccaggcaaagctttttaaaattaaaacaaattacaacaacaaggcatcgaatgatacagatagaaccatcagtagtatttgagcaggatccacaatgccatcttaaaggatgggctcttaccacagtgagttttgtttacgtaattcactcatttatgctttccctttcaaacctcatgtgttctcttttttcttccacactaaaatgatacctgcccagagatgtaaaatttaatgtatattattatatataatatataaatatatataatttgatatacatatagtttgatatatatataatgaaatattatctttaggcagcctgccttctcaccagaggggtggaagaggaagattaggggccagaatgatctcctctgctttctttagaaatttagggcagtgtgatgcttccagaggtctgtacaaacaccagctttcattgtgcttgggagtttccatgcctcttccttctcttcgcttagtgcacgtttctgctttttatcagtttgactgcctgagactgattccaacaacccaaactgaacgcctcagctcctccttgtcaaaggaggatgacttgtcttaacaactatttaggtgaattatttctacagtttttgaaagcaatggctctaaacaaattccactggggtgacaagtacaatacaaaggcgtagcctcgagggcttggggttcagaggttcatgttcttacacggtgattcttgacaaataaggcattaatcctgtcaggcattacccactcatatttgagcaaaccatgacctgctaactacagctttaattttagttcattaactcaacaattataaaaataattcactttttccaatcatttttatcaagaatattaaacatcagaaaaccggtaacgaaaaagataatagtttttatgtgaagtgcacaatgaaaaattcttgagtgaaacgtaacattgcatattttctccagaaataaagtctaaatcctgatactctcaattacatttaaatcaacacggacacagacacaggttattcatctttcaacatatcatccaataacacaaatccaataaagtttattggattaataacaaaaatcccccagtcctcaatatcaggtgaaaaaaactaaaggcaaaatgagaaggtgatataggaaggccgactgtgaaacaaattcagtagagaagcaacgatgggcacagtggtaacagcctttttattttagttaaatagcgttgatttttcaatttaagcttttgtttctggagttgcagagactgtttcccacagtcctctgaagaatacaatttaagggacaacttagattttcaagcatgttgtgctaggaccatgaatggtgataagctctcctggggctatagacagggagccaatgattcggaattccttggacacatgtgtcaccaatttgaggcaaatatggcacaagcccgttcccccctccatcccaacacacagacacacccacacagacacacacagagacacacacacacacacacacacacacactgaacctcctagctgtacctaatgtaaccaaaacatgaatttacactcccactggcaatcaactgtccccaagaattcagactcccactgggaaccaactgccccagtctgctgggattgggggtctcctgggcacagaacttggtgctgaagtcaggagattcccagaagacactggacagttagtcacccgtgtgttggtgcagcagcaagaacggtgatgcgaagtctggctgaattcaaagccatgcatccttcaggccttcttgcatcagattcctgcagagaacacagccgacagaataacttgggccacatgactggcttatatcgcttgaacaattgaactgctgtgaatcgacagcacagtgctgagaaatgtatagaactggcatgtgtatctctagcccccgacacctgcaggtcccgcagtctacagaccatgcctgcttgggtatgcacaggcatcacagcgggcttaaccatccccaaacgtaattccgggtccccatttgagcgaacgcctcagctttcacccaggttcccgaacaagattgcgcaattcgtttctttttttttttttttttttttttttgagacagagtctcactctgtcacccacgctggagtgcactggcgcgacctcggctcactgccagctccgcctcccaggttcacagcattctcctgcctcagcctcccgagtagctgggactacaggcgcccgccaccgcgcccggctaattttttgtattttttagtagagacggggtttcaccgtgttagccgggatggtctcgatctcctgacctcgtgatccgcccgcctcggcctccctaagtgctgggattacaggcgtgagccactgtgcccagcctgcaattcattcttgattcctcctactctgtgagcagattcagcctattatcagttcctaccccattctgcattaaaactccgtgtctccttatccacccccaacaccgccaccctccttacagtgcttaccgcctctcactgcctaactggactcctgacttcggtggacaccagacgcagcctcttcttccgcatccttgtcagtagacatgcagcttcatcttacttttcttctcccaacacatacctcttgattttcaaaatttggctctggtatacctctaggagatcttctttggataccctaccctagtctggctacaccgccgtttgagtataaactcttcaagtattttgttcccctagtcacatatacaatccttggaagcaaagaaaaagtgtggtttctgatttctaatacagagcacctttgcacagagtagacccaatgcagcactgatttagggctggctggggaaggagggcatagcagaaggaagctgataaagagactaaggcttcagtgcagccttccaggtcctattatcttagcatgttctctacatagcagctaatcaacctgaaactttcggtaagtaaatggataaaactatactcgtttagaaaggaagaatgtctgaaatagccattctaaaggcacttaagctacaactagaagtgaaaattatctcaaccataagaagagcaaaggtttttttccacagtttagttttaaagaaacttaatctaaatggcgtcctgtgatacacctacagaaactgaagtcttacaaacacatctcactccagactcatgacgcttctgtacgttgtttcttcatggacctgggatggcagagttaggagaagggctcctgtgtgttgctatcccagtgtgtcagtccgctgtcatcaacacaatatcaccatgtttaggctgggaaacttcgtgctatacaggaattttttcttaaggtctgacacgtaataaaggatgacggatatcaaagaggatttggacaacagccaaaaggaaaatggtatttcagaattaaagatgcaacaaaagctatgactctctttatcttactctgaaatacttctctaaaatatttgttggccttttccccaggttaaaaaaaataggagaaggagaacttcatgatggattcttgcatccattagcaaagaagatgatcacaaatccatgtaacaagcaaactaagtgacacccagaagctggaaaactggtcatcaactcagtacattttatacacagctgtcatgtgtatcattagaaggcaaatgatggagaaatgatacaagcacacagccaccttgcttgacagcacatctaagaatagaggaagctggtttccatttgtctctgcagctggaccagaaacacatcatgggcctcactttatagaatatgacctcctgcttgtgagatcaaattgacaaattgtgaatttttaaatcatcttattttctctttcaggaggaaaaacataaaacgcaattgaggccagatacagtggctcacccctgtaatctcagcactttgggaggccgaagcgggtcgatcacctgaggtcaggagttcaagaccagcctggccaacatggtgaaaccccgtctctactaaaaatacaaaaattcgctggatgtggtggcatgtgcctggaatcccagctactcaggaggctgaggcaagataactgcttgaacctgggagacaggttgcagtgagccaagatcatgccactgcaatccagcctgggtgacaaagtgagactccaactccaaaaaaaaaaaaaaaaaaaaaaaaaaaaaaaaaatgcagttaagatattagaagacaaacaataaattgcttatcttctccttaacacagtccattctcctcttcaagttcttcaatactatcattgaccaaaaaaaaaaaaaaaaaaaaaaatgtgaaagtacgtactgcacacttaaaataagaaggacattatgccaaatgctgagagggttaacagagagtggtccctgtcttttggaaaaagcatgacacaaactttattacaggtttttaaagcttgggccaattggttcagaaaatatgctttaaaatacaaagtatgtaacagaaaagatgttaagtgagatctaaaagctgaagacaatttgtaataaagacagcagtaataaaaaaattagtcatagagcaggaacatgttggtaaaaatactgtatctgtcactaatcaaatagctaggtatcaaagacaagatatcgacttcttagaaaaaaagtatttttaattgctgttaagagtattcttaacgaaaatcaccaacagacagggaatagtctttggaaaattgtaggttctaagtaaatgtttatagtgttggcacttcagtagtgacaccactttgggtagaactgaaaacagccctgtcttctcacaaacacggctgtagggatagaagagtagaggcaatattaaacatatttaatcatcagtatggcagagagaccctccaaccaatcatctgatctgatggatgctggctctggtggaagaaacaggcatgtggaccccctgctgcatcagtccttactgtctagttgctagatcctagggagaagacccatctgacaacctacgaggtaagctgaagaagctacctgtgaaggctgagccagtgggtacctgcaggacccatcctgaccaagcctggccctgggcactggcttcaaagggagaacacacccgtatttgaagccagtttccacccaccaactgtttatcctgagcatggcaattcctctgatttacaagagattttgatgagtgtggtttttttttaaaaaaaaaaaaaacaacaagaaaagaaaatcaatgttaatcgctgattcctggagcatctcagagaattaagccccataccaggtgtgtctggcacagagaaaaataatatgactatcgatgtgtttcttactgtgaaagagttattcctataccttttgataccatgatttgggttttacggacctagatgtgaaatgtgtcctgttaaacacatgtggagggaaggggggaactcatctttcccattctcaaccaagtggttttacctgtttgcccatcttacttacatatatcatttgaattgcatctttctaagactacttttgaatttgtagagtgcttgggacaccggagaggggtttgcggaggaagaagtgattggggcttcccgaggtctggaacaggaagggaatgtttactaaactcaggggagtgacagggaaaaaacaaacataatgcattgaaaagtcttgcttattggaaaagattacctgtagttttctataagaaatgatcatctggacatacccatgtaattaagaaaatttcaattttatactagatgggcctgttaatttattgtctctgagcttcaaatgcaccctacattgctacttaatcataatggagccaatcatcataaatatttattttcaaatagcatgatgttaagctcagacaatgaagagcactagaggttcacatgggagaggcagcttcccttcccggtccttcatgtgctcctctgtatgggatccagcagcataggacacctcttcactggctgcttctcccaagtccctcttagctggcttctcaccacctcagcacccttgcagacagctttgcagtgacttccgaggcttggcacctcccctgggacagcttgatgcagcaccgtagtgaacgtctccattttcccatacaccatggggcagagtctatgtatgtcaacccaggcagaaaaacccagatgtacttctttggttggtggcacttcccctgagaggtagtgacttctccctatatccggtattcctctattctttaaaattccttttacccctgaggtacacaatccttcatgtttttaactccttatatacttaatatttctttacatgaaactttctgtgtttaaattactttatggttttgctgtcttgagtggatgctgattaatatactaaatatcaaaatgatactaatcaccttgtaaagaaatatggaacttataatgatcggtcacacttaaatggttgcagagtaaccacaaaaaatgacactcaatgagaaatatctttctccctctttttttttgtgtgcgcacaagggatcgattagctgaaagttatatcagtaatcataataatgaaattaatttataaacctaaagttattacaagtttatggggattattggcagtgatttttatcagttggtttctaaaacagtctgaagttaaagttatgtgtaactactattgctaagcatgcatattatgagaaatagatgaaaattctgtatagtgtgaaagaggtatgtattttcttaatgttaactgttactctttgaaagacattgtaacagtaaatacaaggaaaaaaaagaaaaatcatcacccacacctcagcagcaaaatcaatgagaatgtattttgtattctcaaaggtccttgtctgaaactaaccaaaactgcagcaaaataattagattatttctttattagtgggaaaaatattctccttttgttacttacaaaaacattttatgcattgaataagataacggttaggaatatttaattttttttaacaacttttcaattagatccaaagacccactttcagaactgaggcaagcgtagcactgaatactcattccacagtgaaacaagcacaatgggtggagaatgtattaaaaatatttaagtttctggaagtgcattaagcttgtaaaccaacgaggaaacatctaaccaagaacatctcagtgaggattcacgtttgtgcagcttgggccacagcctgctttcttccccttatctccaatctaggtgagtatggccaggaaaactagattctctctacctgcagattccagccagggtacgcttctaaccaggagggtcaggccaccatcctttctcatcctcacaagcttcataggcaaaggataaactgcagatgagtttggccaacaggccatgtcgctttcaagttccacctatgtaggaggtatgggaggctcaactccagaataaaaggtcaaaatgctgcagttcctgtcacttgtgcaccagatggcatataaggtgaaggttctatgccaccaggagcaaaccaagacaatcaagctctcacctcagacccgtggtttactcatgaaacaagaatgtcagtccagcagaagctgagagtgtctctgccccacgtctgaagcagtggctcagagatttttcccaagaggagagatagagggcaggaaattcaaatccaaggttgctctcaaaaataaatggaaattgtgaggataagcaatttagaggagcctggtgctttcactagagctgcaggctaatccatggaatggctagtctaagataataagagacagagaagaagatcgcattgtgggttagaacaaacctcaaagcctggcctcaaaaatatctcctgcaaagaagtgtggacataagaatatggagcccagagcaagttcagaaataatgaagcaatcaggtggaaatttattagtgattcagcctctagcctccagaactatgagaaaattaatttttgctgtttaaaaccatacaatttgtggtactttgtgtcactgggcctagataactaaagcatgcccctaccagagcctcaaaatatataaaacagaacctgacaaaattgcatgccaaataaacaatcaaacaataatgactgttctactcattttcatagaggaacagaacaatctagccaaaatgaccatcagactagacaaccaaaatagtactataaaccaactggaatgaacagacatctacagaacattccagccaataacagaatattgttttcaagggcgtatgaaacattctccacaacagagcatatgccatgccacagaactactttcagtttatttaaaatgagtgaaattatataaataaattatctgagctcaatgcaagaaaattagaatttgagaaataatagaatacgtggaagttaaaaaaatttctaaaaacccaaaggagttaaagaaatcactagggaaatttaaaaataatatgaacgaaaatggagatcaaatacatcaaaatgtatgaaatgcaactgaagaattgcatagagggaaatttagagtagtaaataactatatttaaaaagaaaaaatcttacataaatagcctcaccttccacctcactgtcctggaaaaagtacaagctaaacttacggtaagcagaataacaaatattctagtgagaataatcaagtatacaatagaaaaaaatgaacgtaagcaaattcaaagaaatttttaaaccttctacaaaattaagaatcttttgctagactgttcaagaaataaagaagtctcaaattactaaaatgggggaaaaaaaggtagagaatattactatggaccttacagatatttaagaagaagactgtaagagaattttataaacatctggtagtcaacaaactggatgactacaaaaatacaaattacccaaaacttaagtcaaacaacatcagaatagacctcaagtaaaggtagtaattttaaaattatgctaaagaaaattccaggctcaaatggcttcactggtgaattctaccaaacattgagagtagaattattgtcagtctttaataaattctttccaaaaatagaagagggatcacattccaacttattttataaggtcaataccccaatatcaaagccagacatagttatagatagaaactacagactagtatttcttaagaatatgaacacaaaaatgctcaaaacaaatcaagaaattcagatccaacaacatataaagcattatatactgtgtccaagtgctatttatctcaggaatgcaagataggcttagcatctgaaaatctaacactgtgccataacaataaaataaagtcagctgattgtcttaccagataaaaagtgacaaaattcaacattctttgatgataaaaacaattaactagcaatggggaatttcttcaacctgataaaagtcacctgcgaaaagcctacagttaacattgtatttaatgaaatattgaacattttctgcctaaaatcagcaataagacaaattctattccacagcatactggaggttttagctagggcagtgatgcaggaaatttaaaggcataaagataggtaaagaagataaaaatataactatttacaaatcacatgatctagtatacagaacatcttagatatccattaaaaactattagaatttaagaacatctccagcaaggttacagagtagaagatgaatatgcaaaaatccatatttttttttggtgggtgggggtggggtgttgggggatacatcatcccgttgcccagtctgaaatgcagtggtacaatctcagcccactgcatcgtgtacctcctgggctcaagcaatcctcccacctcagcctgctgtatagctggggccatgggcaaacaccaccatagccagctcatcttatttattatttatttacttattttttttttttttttggagatggagtctcgctctgtcacccaggctggagtgcagtagtacgatctcagctcactgcaagctccacctacggggttcccgccattctcctgcctcagcctcccgagtagctcggactacaggagcccgccaccacgcccggctaatttttctgtatttttagaagagacggggtttcatcatgttagccaggatgggctctatctcccgacctcctgatccgcccacctcggcctcccaaattgctgggattacaggctgagccaccacgtctggctgctaatcttattttttatagggatgaagtctcactgtgttgcacaggctggtctcaaactcctgggctcaagggatcctcccaccttggcctctcaaagtgctgggattacaggtgtgagccaccacactcagccacaaaaagcaattgtatttatccacaatagtaataagctgaacatgaaatttaaaaagaaaacaatccctttaccatagcatctaaaaactccaaaataattaggaataaatttaacaaaataagtacaaaatatatattccaaaaactataagtgtttaaagaaattgaagacctaaataaatggaaaaatatttcatgtacatgaatcagaagacttaatatagataagatggcaatactccccaaattgattagcaaatttaacataattcctattaaaatctctgctggcttatttgcgtacattaacaagctgatcctaaaatgcatatggatattcaaaggacttagaatactcaaaacaatctttaaaaaagaaaaatttcaatattcatacctacctgattcagcactttctaggaaaccgcattgatcatgattccattatgcttgcattagacacatggattaatgaaataaaattcacgttccagagataaaaaccactgacattacccgtcaatttgatttttgacaagatgccaaaacaatcaagaaaaaaatagtttttcaataaatggtgctcagacaactgagtatccacaagagggtaccccttccttacactatccacaaaaaaattgataaatcatagacccaaatgtaagaagtgcagctcaaactctttgaagaaaatataggagtaaatctttgtaacctgatgttaagcaaagtcttcttagatatgacatcaaaagcacaagaaaagaattaactggaattcatcaaaattttaaactttgtatttcaaaaaacattagaacagaaaaagatctatagaatagggaaagtttgcaaattatataaaatataaataacttgcatctggaatacataaagatctcttaaaactcagcaataaaaagacaaattaccaagtatgggcacaataatcgaatagacgctgccccaaagaagatacacaaatggccaagaagcccgtataaaaattctcagcatccttagccatcaaggaaatgcaaatcaaagacgtactgagataccagttcatgtccactaaaataggtaccatcaaaaagacagttagtaagtgttggtgaggaggtgtatgggtgtttcacttccctatggctggtgagaatatagaatggtgcgtctattttgtaaaatactccggaagttcgacataacattgccatatgaaccagcaaatccacagctagttctatacttaaaatgtgtccacgtaaaaatttgtatgcaaatggttatagcagagttattcataattgcaaaaagtggaaacaatacaaatgtcagtcaaccgatgaaaaaacatggtctatatccatcatattaaataggatccagaaatacagaagaagtgaactgccgatttattccacaacctgacaaaccttgaaaacctactaaatggaaagagctagtcacaaaacacattttgtaccattgcacttacattaaatgtccagaataggccaatccctagagacgaaaataaattagtgtttcctttgggccgtggggctgagggaaaatagtgagtgggtactaatggatactgggttttttgcattaaacatcttccaaaaataactgtggtgatgaatgcataaccccaggaatatattaaaaagcactgaagagtacacttcaggtcaatattgtggtatgtgaatcatttcaatatagctctgattaaaagaaagcagcagctcaggactagagaacagagcgcaatatgggatattgaaattccatttagctataagtctcatttcctgttatatcacatgacacctatattaattcagtttacgaattaaaaaaaaaggaatatggtaagaagactgaaagaaacaggtttctcagttttctaaaagaatgagatagagctcagaaccttgagtcgaaggcttatccctccagctggaattctacttcctctctacttcacttacaggactctaatttagccttccaagacccagtttggatttcactgcctcttaacattcccacattaacatcttcctgcagtgattgtatgaagcacagggcattattatgtatgcatgcaatggacagacgctcttcaacttacagtgcggttatgttctaataaaaacattgtaagctgaaaagagtgatgaaaatgcatttaatatacctaacctgcaaaacattgtagcttagccttgcctaccttaaacacactcagaacacgcacattagcctacagctgggaaaaccacctaagtcaaagcttattttataataacacattgagtatctcgtgtcatttattcaatattgaactaaaagtgaaaagcagaatggtcgtatgggtactcaacgggtggtttctactgaacgtgttattactttcacgctattgtaaaagggtaagagtcccaagttgaaccatggtaagtcaggggccgcctgtagtcaatcctgtaatatagccaaactctgtattgttgtgttttaatgtatctacactgattggatcatcagcatccgttgctttaaggcgagtcctgctgagtggggtggggctgggctgagagatcaagaaaactgattctctttgaagttttgggaggaaagtatctatgatcccaatttaccctgctgtgttagttttattagttttttattagtttttattagttttattagcctctccattggggctgagcacgaagccatattcaaaccagatgtgcttcctcccactcatgatgccaccagaatgacttctttttcctgaacccaggagctaccttgggaaaggaagaaaataggaaaaaagggaaacacaacaaggccgagcatttcagactcagtttacctgaaacggaacggttttcactgggagacactaacagttaattttcccatctaaggctcagaatattacccccaaactatgtcactttatgtcaccagagggaataggaagtccaaaccaggaggatgccacataaagtatacacatttgctctgaagtttgagtatgtgtctctttcatctttttttccagtgcctgtgacccaggtgctaacccagacactaggatgtcttggtgaagatgacggtccctgtgcttgcaaaaagtgtacatcagtacatgtctactaaagataaatgagaaaacatggtttgaaagtctatttcatcatgctgaaggagccttgtacgttcaccattgacaccatcctgccttgccatattattttaaaataccaagatggttcgtcgtcctcccaagaggtgacttaacagtgggggatatggaagcacatacaactccactctcagaatggaagtcaagtaaagcaatgcctgtttttcagcaggccacttagaagtcagacgttgaggattattaagttaaggcctcagtagaacaagatttccaaatcccaagtactggagagatgaaattcactttattgctctgaccattaaaggaagaagaatggtaggaaaggatgctggtgtttggaggaactctagtttgtaggtcatctattattttctcacctctgagaatgggggtggttatgggtactttactgccaacccaccccacattcctgaagtatctcaagccacacattctatcctcttcacaggtgattgtatctggaagtggctgactcactgcactaacaaactcacagccatagaagaaggaaaagtcagtagagaaattatgtgcttccaataccttgtgggagagacaaggacagatgggaaaagactgagacattaaagatgtgcaatcacatttggattgacaaattacttttattaccatccaatgataacacaagtcaaacaagttatggagagattaaatatcatgacaccagctctcgagtaaatgggaggatagttttataaagaatgaaatattgtgagagagtcttactccgtggtcttaagagctgtttaagattgggcatgatgcttttataatagtgagacagggatctctcctggctatccttcccagataaccacagatcagtggaagaataagcttgatgaggaagaaaacagaggaggaggaggagaaacagaagagggaagaaagaaagggaagaaaagttgacagaggttgacaaggactagccatggagatgtatcggggagttgaagaaaaaacaaagccaaaaaaaacactcactttgatattgtcttcaaatgagtatatatatactcaatatataggcaaggaaatttagcctatatattgaacaaatgttgaagtttattgtttagaaggcaatggaaagctgtgtttggaaaaccatgagcaaaaatgggcaaacaaatgccaacagtgtcacaaagtttagttattctaagagttcataagccagttcaattttttgactttatttaaatgtttaatttttcagaacaaatataactctgagttgggatatgttctccagtcccagctttttaaaaattttaaaatggtgtacaacaaatacatatttccaataatactatatttatcaaattataatatgagaataccaccaactgaaatccatagaaaaataacaagccatttaaaatttaaattcagagagcaggggaaacattattccaagatgacttcagcgatgagactaaggttatttttaattatattgaaattttacagtgtgtttttacagcattgaaattagaatttcctgtgaacatttcttccttcccttagctgtaaggaaatgctcagctgtgggagctttctcaacatagctcaactggcctcaaaggcaacaaaagtctgtttcatggcagaacaattaaaagaagtgattagctttgatttcttttcaaatttcaacttagtcttgctctagattcttcagagtaaaaaaaaaaaaaaaaaagaaaaaaaaagaaaaaacaaatgttgacaactcgttctgtaaacaatgttcaaagtccttaacagtttccttgtgtctgcacaaagctcccagggacacattccagctaagaatctacttcaattcgtgttcaattaaaccaattcatggcaaggaaaggaggagtcactatacagattatttaattgacccattactgaatgtgtaattcctgcacctggatcaattcaaatgtcctcattccctgctcatctcctccatttttctctttttccgtcttagactaccaagcagacatccttctaaaccgttaatcttggctgtctttgtgccacccatgagtggccagaggatagagttctgacttaagcacagacaacttttttctttacttagcacattaaacctgttgaaaaattgttattttaagaaacaaatattttctcccttttcaagagtcagtgcattataacaattcttttcagttttctgaaatatcttgttttacctttcttgtccacatgaaccaaatcaaggtgcaaatagggttggacaagctattatctttttaaaaaaatctcaagcccaatggtaaagctaaagctaacaaaatatttaccgtagaaagcaccttgcatttactatttcttatatggggaaagaactagtgaaataattggacaaactcaatgaaataattggacaaaagtcagtgaaaaggagttccaaaaaaacagaatcatctagtgggttgaacactggtttttgggatccaaacagttggaattccattcctgaactaacaaagtaatatgatggtttacaaggcttgactaaggaccctgtcctaagctgtagatttgtgtagtgataaccccatctctcacatgggttactcaacaggccctgcctcctgtccgtccctgtcttctgaaattgatctgcactgttctgatgaaccgctttctaaaattcagatataactttttgactaaaaaaagcctacagctctctattttctgtgctctaacagcacttgtcacgctgtgtaagttgagaaagcagcagtgcctggggcatgcctggggaaaggaaggagagctggctgacttctgagactcctgaccccaccttcacccaaggaacttgagaaagtgttgatcttctgttattgactgggcgataggcctttttaaaggtgttatcacaaaaccttttaaaaaccattaataaagaggataatattttgattttaaacctttagcagggtagacaacacctactttgatgagactcaggccaaaacttcaaaccttatgatttaagctcttgatataccaactcattcttatcctctgaacatgtacttttctatttcttcttacatgaaggcatttacacactcttgtccccagctaaatcctccttccttgattcatccattcagccacaaatgatttttcaagattcaatttgaacctaattgttaaaatggtccatatcctactaaacctaggtagatctcctcccctggactgtatgtatcataacaagagtgtttagcataattcaaaaacattgcttagggagagcctactctgggcttgcttctatgtctgaatcagcttagcatgtcctgtgtttttcatataatggataatcaataattattgtattgaatttagcccaaacagcaattgaattatcaattaagctaattataaacttgaacactgcaaggaattttagaatattttggctaataggaaaggaatgctggaaacaagctcattctgtttgactccttacagaccttcaagagcatgatgtgagatgggtatagttctcttatcagagactctaaaaggaaaaaaagttcaaaagacaatgctatactctctaaatgaaattttaataacaagagcacaattgtgtcttacacagaagacctgtttgaagagtttggtgtggcctccctggagctcttttggtaggaaaatggaagaaggcactacttacttaaagacaaatacacatcagtggcagggacctagaaattacctctccaaggccaagacctaaggaaaggaaagctcataaaaggagctcaggggtcaggctgcagcaaagacactatgattgtcatagtcagtgggactttctcattctaacaattattttcggctttctgaaaagtcttgttattttaccttgtccacgtgaaccaaatcaaggtgcaaaacggctggtgtcagcattctgccgtattttcagattacaagtatcatctgggactgcaaattgtgttattggctacatttagagaaccaattcagatcaaaacaggtgagtagattttacctagaaccaaacctattccttccggagccttcctcttctcaattaacggcaaacctattctttcagtagcttgtgcaaacaccttggagtggtctttgactctgtgtattcctgacatccctaatgtagcttagaggccagtgtctccccacctcgtctggaaacaggcccagggaactcttgtcatcacaggcctaacgtcaccacttttgcccttgtccctctacatctctgcacaggaggcaatggaaggagcccttggaatatgccaggcgacagcactcctctgcttacagccttctcacggagggaacccaaagtccttaaaatgactcgcacacctacgtgatctggcctttggttttcctttttttttttttatttgagacggagtgtcgctctgtcgccctggctggagtgcagtggtgtgatctcggctcactgcaagctccacctcctggattcacaccatcatcctgcctcagcctcccgagtagctgggattacaggcgcccgctaacatgcccggctaatttctttttgtatttttagtagagatggggtttcaccgtgttagccaggatggtctcgatctcctgatctcgtgatccgcccgcctcggcctcccaaagggctgggattacaggtggcctttggttttcataacctcatctattcctctccattgtgatccttcacctgcctcctctggcctctgatatttttcagccctgccaggtccatttcccatcaggggctcctcctctatcccgagccttctccctcctctccttcaacctttatttcatgctagtttctacaacgtggcgtcacttgactacgatggttcaactcccaatgcttcctctctcttccctcttatttttatctgtagaattatcacctgacaatttcttcacagaagtgatagtgctgctatgtagacaggttggggtcatggtcggcagctcaatgcttaactggaaggataagtgcatcaaacacggaattccttacattaaatgaactcagacaaaaatgacatgccaaaggattcagagtgaatgtacaaccaaataatataactgccaaacactggtctaagagctcataaatggctttcctgtacgttaaccatttcaacagtgagatttctaaacggccattagtgctttttgaaaaagaatggtacgaaagagtaaagacaaaaagaagaaaggtaaaatgaacacagaaaaacaccatgaatgacttaattggacccagattatttagacaatatttaaggattgtctaacacattcttacaggttatctgaatcgatgttgtctctgggcttctttgattttttttgagttatgtaaaactgaattatttttaagtaactcttaatgtaaatgattgtttagtatgaatgtgtaaataagtatttttgggatttccctcaagtgacatgtcaattcagtgtcttttaaatatatttgagcattacatactttttatgtacgaggattctatgaaatatcttttgaacttgcaaggtctaatttcctcattaataaatcagttaaaatctttgacatatttgttttgtatttgtgtgaaatgtttaatttttaaaattatccttcaacagaacagaaccattatcacatgccaggccttactggatttaattccaacaacattattatggaaaaacaatcttagaaaaagtctcgtgttccccaagctcacaaaatggtgtcctacttaaaaaaatcaggaacaataaatttcacaacaaagtcaaacaggttggtaaaaagctggaaaaggcaatagtgatcactatatcgcagcttatttctagaagacattgggttagactatttctaatttactattttgacaaggttcctatacaggtagattacccaagtgcagcacgtagctgtcagcaagcctctcgacaaaatcattcacaagatgcatgtgcctaacaaaacatggctcagtgtctgggtggtcacaggacggcacttctgcttaagaattagaaccagtgcatggtgtttaataacgaaggcccgttttagagagaggtgcagggagaaaacaacccagaacattacacctaactctgcggcgactggttggaaagaactgggaatgctcaccctggttgaggaaggccagcgaacgcagagagaacacgacccatcttcaaagaaaaatgcagcaaacacgcggagaaaagaagttagacccatttctttagcgtcacaaaggagactgaggagcaatatatagatgttaacaggaagctggcaggtgtgtctaatgactacgctgcaaggaaggtgttttcaatgattaggctacaaaaaatggtgtttccagtgggtaggctacaaaggtgtttccaatgattaggaaataacagggactttatagagggtgcaaaacagtgaataggaagccttctaagcgatacgtattatctgctctaaccctaagaatcaacatttcttccaattttttaactagaaataattggaactcagatttaatgcttagctgggaaacttgttcgacacagtcagcagagatctgttctaaagaatgctttaattctttcttcaatatcgatgtgtcttgattgtcatactttttaaatattaattttacttttattaaaatgttattttttctcttatttaggaaatctcaaaaattattttaaaatcgaatagttcttacacttttgcacagcctcagatgcagtctcttctaataattaaaaaagtaaagctctaatttttacttgacaacttaccaatagtagagaaagcatgtatgtacctggtttatttcatccatcacttgatctgtagtaacagtgcttcactgtagtctcttaatacttttattttaaaggtatatgtcatttatagacatatatttaaggtaataacagatgaataaaatgagagggacccggggaaccttatttatgctttgtaaaaaataaaaggaaataccaaaacagtatttagaattatattccaaagaatagctattagaaagttattcatcatcactttgaaaagttaaaatatttaacaagatattctgcaaacaataagaaaaataattttaaacaaataatttataaaatattaattgctttgttatatcaagaaaatattgaaatgagcatattaggtgtaaacagcacttttactttcataactgtggacgttcacttcttttaatatagaaagttattttaaaataccattcaatatcattgatcttagatacttaaaaaatttggtatatataccctttctgtaagtgtgatgacatatgattaaacatagttattcacttttagaaaaattatagtagaaatttttgccataatattttgataatttacactccattctatgtaaatctacagtaacattacctatttatatttcatatatattatttttatatgtacacataaattatattgtttaaattcctcaaacaagtcaaaatattcaaattctgcattaagtgatattttaggatatgggcctgaattatgtaacattttctctacttgtgtttgaatttagataattacaaccttatagtaaattcctggaatatagattttaaaattccaatgattttccaaaccaatgacgacttaaaatttcaattataaatgattaaaaagttttaaattttaagccattttgtaaaattgtaaactctcatggttacattttcggatttagaaatatgacaatcaatgtgagttcttaacacaaaaggagggaaaatcagcagagacaacctgatgccattggggtatctgaggttgagaaagtggctggcttaccccattctcattgtaggtagtctttaatccagtcagcttacctgagtattattttgtttcataagcaaggatttcacaaagtaatacccagtgtctgcaaatccaaagaacccccactcccctcttgcacctgctttgcaattaggctatgcctttttcttgtacttctgcctctccatatcaatagtagttatgcacaaatacggacaagatgacattgtacatcactttacctaaacttggggagtttagtttcctttatctgtgaaaacaaagagcatatgactctaggtaactgtcaaaattaaatgatgtaaggtatgcaggaatgtgtagcatgtagtaacacataaatgttagtttcttttcaaccaaatggctttgggttttcttttaacctattatcttataaaatgacagaaaaatagagatagaattgtcaaataggaacacgcaaatgatcgtagcatatataagaatttaatatatgagagaggtagcttttcaaatcagtgaaaaagaacaaactaatcaataaataatattaaagcaaatggttttctactggggggaggatttaggtacctgtgtcaaaagagacacaaaaaattaatttcagaaagacccaatccattaaataagagatactatcaaagaaataaaagcaaatatatgcaaacgtataatgtatgcaattacaatctaaacgaacatacacaaaaagaaactagagagattgaaaatgataaatttgcctgccttacaacacaatttccacacatggaaataatcttcgtaagtgaaaatttaaatgtaagaacggcctacaagttgtttattataggtataacacgagacataaatttaaattatgtttatgtttataaatagttcagcaaggtgacagattaacgttccaaatagaaaaaaaacataccactcagacattataaggaagattttatgctggtgttgtctaacttgagctgattagaataagaggaggacagagaattggtctaagaaaggcagagggtcatagaagtgaaaaagaaattctgtagaatggagagagactgaaaatggaaaatcaaagttgctaagggctgcagtcttagagagcagattagtacaaactttgagcagatgtcatggggtttagcacttttgagagtgagagctctaaagagaacctttaggcggtgtttctgtgtgagctactacgtaacccattcctgggtgccctcaggaattacagagtaaactcttacacagttgacgttgaacaacaacgtggatctcaactgagcagtttactcccacgtggactttcttctccctctgccatccggagacagcaaataccacacctcctgtttctcctccccagcctactcagcatgaagaccatgaggaggaagaattttgtgaccccttccacttaatcaatagtaaatatattttctcttccttatgactttcttaacattattttctctagcttactttcttgtaagactatacatataacatacaaaatgtgttaattgacggtttgtgttatctgtaagattcctggtcaactacaggctgttagtaattacgttttgggggagttgaaagttttatgtggatttttcaatgcataaggggtcagtgtcctaacctctgtgttattcaaggattaactgtatttatttttaagcatttgaaaaatggatatgtgttttaggatgctttattatgtttaggctagtattaagcaagcctattgatatgattatggttgcctataatacagggctgtgaatatatatcttaaaagttgtggatggcattcaatactgtttatctatttcctccctccctctctcactccatttctatatccataatagtttgaaatctaaatattacaagcatgtctccaaattgtgatagcttcataagacagaagcagtatattaataaagagttaatgtatgaacaatatcaaatgtgttatgatcctgaaaacttgttgagtgtttctcttttttaatattcacctgtggcatcatatggaaggcaaccccatttgattctcgatacagagaacccagaattgtgttttttagagaaaaacatggactcagagataactagaaagtttcatctatcttgcaacctatacgtcttaaataccacccaggcacaacgttcttttcttagggttttttttctttttctttttcttttttcttttcttcgagacggagtcgccctttgtcacccaggctggagtgcagtggcatgatctcagctcactgcagctgcctctgggttcaagggattctcctgcatcagcctcccgagtagctgggattacaggcgtgcaccaccacacacagctaatttttgtatttttagtacagatgggatttcattatgttgaccaggctggtctcaaactcctgacctcaggtgatccacctgccttacgctccgaaagtgctggaattacaggcttgagccacctcacctggctcttttattatactttgttggtgttattgctgttggtttcattttgttgtctgtatttttgtttatttgcacagtcatatctttcattttccgtaattaatcagcagacaaaagcaatgtattatttagaaaatttctggttaagacagtgtgattttttcaatttaattatatatatttaatacataatagattaaatttataaacaagttacattaactattaaaagtctcttgtgtaatcttccaattaaaatatagtttgcttcaccagcataactgataatttctttttaacagaaaataaaacttttttaaaaaaagatatgctagaagatattatactttttattcatcatgatagagaccggatgtttataagcatgtatctattctaacacgaaatttcacatgtcaaatttaggatcataagaatatggtattagtattcagcacaattttggctttacattttggaattttggtagttaagtgtgattaattcagcttcttttaaatgtagtcatatatacatatggtaaaatcatataatttgggaatactcatctgaattaatactgaaattgaacatcatcactacttttcggagttctaaaatatgtatttataaaacagaaagggattttaaaataaaacataatcaaataggtctccacaacacttttagtaaaacactgagggtttgagactgcctttagaaatagcaactcatagtctaacaccatcccaaggctgtggactcccaggtcaaatgccagttcaagtcccgatttcaccactcactttatgaatagctttcttaatttctatacctccgtttgttcatatgtaaggattagatggcacagagagcacctgacacatgaagtcctccatcaaaacccatcaccgtacttccctggattccttacgaaaaaagcttcagtcaaaacataaactacaggcttttttgtgaaggaaaaatcccagggaatcaagggtgaaaagagaaagaaatgaagcagggaaggtaggtaaagaaaagcatgaggtgtgctgctgaatgccaattgctggctgcctaggatggacaggtggctgtggttacagggatttccctcccgcagggctggtgggaccccagccttgcagctgtgtcagggagagggaagagcaggtgtgagcactccttcccaccacctgtctcttaagagtcacagtttatccagtgggcattctgtgacccttccttatcccactgtcttcctgcgcagacacctccagctgagcccagcccaggtgagagggctcccagtgacagagctacctagggctagagccactgcagctcccactaaggtgtggacggtggaggctgagctggtcctcaccgtggggaagccgaggcgttggtgctggaaggagttaggctgtcatggcagccgaggggctctccacaagccatcggcaacgcctcgatcagtctcggggacttggtgctgagcaaaattggggggctcagaaactgagtctggtaaaacacatgattttcagatatttatatttaatcactataattaaaatgcagcattacgtgagtggcctggcattttcacacgatgctctatgacacacacagtttaaatgtacatctttttttaaaaattgcgagttgagaagttcctatttaaactgacttctgcacagagaaaggcactgtgagatatctaagaaatcgttgactgggtactggaagtgacgcaaggcatgtccccaaaggatagactgaaacaacctttgtcaattatgcacataccaaaagccattcttgtccaaacctcttactcacaatactgtattttaagtgagaacttttattaaggtggctacagatttggttagtatgtgctgtattatatttttggtttgtttgctttaactggacataaattctgaaaatctcataatcctcatttataactggtggcaaaacctgatacctgatcaatttttgcctggcgcatgatagctatgcaataaatattcatgcattccatccatttctatccatgcagaaaactgttaagtaccgggaactcagtgaattctactaccattcactttcatctcctctgtagcactccccgagttaaaactgattttaacctgtttttttatggggccataagacctacccctggctgttacgttcacaggcctagtgcctgtaacagcaaagatgggcaattttcttactttccttcttcccctctttttatattctttcactcgccaaatgattcacttcatgttaatactgaaaagcttccttagaaatgcttatttcccaatttgctcctaaggttgaaaatagtaaaaagcaactcaaagcaacatgagttgcctcatgtgacagtttaatttatttttacatcttctaagctctgggaaatattaagatttgaaacacacaagtccaaagtattgaaatactttgtaaagttatatatcttgtcagtaagtcacaaatgcctttagataaaaattgaatcaatagtttcttcattagctttcccccccaaaaaaactgaaagtagatgtataaatcaaagaaaatttaatacactgccttccatttaatgtaccgatattgatgatagtaaacgacattaataatgaagcaaaagaaagtattattggcagggcgttataaactatcagagaggaaactataaattttctaatgtcaagttaattttatatggccatggtgcatgttaactggttacttgtaaagctgattcttctccaaaatgcacactttttccttagctcatagaaattcataaaatatgtaacaaattttaatggcattcaaaatatttaaatattctttggagaatagtttcaacatatttcatatgctttgacatccatacttagatttttgaaaacagggctagacttaaaaagcagacaaatggaaatttaatttagtttctggcaattgtacttgactgaccttaattcacggaaattttctcaaccttagtttattaattcccccaaaaggaacgataattcctacactaaaacactgttgcaattcctagggaagataacacagagtatggcaggggctcaatgctattcaaatgtttacgtgtgtaaagaaataagacacagttatatctattttctggcatagagaaaattacaattctttaataaggttaatttataaataaatacataaataataatgggtccacaaccttgaaatgtcttcagagccctgagaagatacccctggaattacatattaatattgccagcatattatctcaggaataaatcaaagttgcatttgtttgcttgtgaatgtgtttttcttggtaagtatgaaaaaggaattttatacagttgaacagctgcactttaccacatatgtccggttacaaaattgattatagttagcaggtagagctttcacttcagtaattaagaaaccagaaaacaaaacaaaacaatatatttggtgcaacttaccatacaaccaaaataacaaagaccttaatggattctcagtagtttcataaatacctttgcctcttatttactcattgatcactcgtttcacttccagagcacaaataacatttttctctaaaattttagttgactgctttaaaaatgactttccagctgggtgcagtggctcacgcctgtaatcccagcactttgggagatccaggtgggtagaccacgaggtcaggagagagagaccatcctggccaacatggtgaaaccccgtctctactaaaaatacaaaaattagcttccttagaagctaattctctactgagaattagagaaaccccgttctctactgaaaacacaaaaattagccaggcgtggtggcgcccactcctttagttccagctactcgggaggctgaggcaggagaattgcttgaacctgggaggcagaggttgcagtgagccgagatggagccactgcattccagcctgggtgacacagcaagtctctgtctcaaaaaaaaaaaaaaataaaaagtcaacaaaaaaaagcaaactggataaagcaaacatacttatcctatcattctccctggagaatgtggtcgtgagttctgttagagaagtttgaagtagctgaaccatgaccagttaaaaggaactttgttctgtgctgtttcattgagaatctgttttctactattttcctaataccacgagagtgcattgttatctcacaaaaaaaaaaaaacaaaaaaaaaccgagaaggaaattactgctgtaaggaaaaagcaggacttctcatgtctagggtagctctgagttgacccccaggatgaatttgcacaaatcacttaacctgtgtgtttctgcagcctttgagaaactggttcacctgttagctgagaaaattacatttctcactagaatatttgagccttaatttaagtttgtaaagcgcgttaacatccttatctcgagtctattgcgagcataaccttctactctcataaaaaagcaggggcctcagctagttgtattagacaaccagatacttggtggacggaaatttctccgcctttttgcaccatgcgtcaagcggaggtcctgttactgcaatcagcacggtttagcttcaccttacaaaaccaagaatgcatgagaaacaaacacgtctgtgggccattctctaaaataggcttgcatttactaactccctatgggtccttgtgtagctgtgtatccatctctttctgacaaccacctggtatagaatccacttttttgaggtttcaaaatatactgcattatatgttgaagacgaggactcaggaaccaattaatattgagctgtgtttcctgaggccgactgccacattcaggttttgtcacaccattgtcattaatccctgggtccctggttaaagatctagattcctggggtacatccctagttgttgagttcatcatcttagtgactggccctagaaatctacctattaacagtcttccccaggtgattctttggtgcagtgatttttgaaaccttcacaataaaacagctatttgtttctatttctctcccaacccaagtagtgacaagatatgaatatatctaaatatcacctaagtaggaaactgccttttccactccagccttatttacaatgagcatctcaaggcttgagagccacacatgtaagattccgaatacacatcagttccagattatagtcaattgtgcttgtttagctttaccttcctatcagcagacctaagagtccaaatttagatttgtacgtgcccatgcacattttcctgctgtgccagccctatcacactgacccttatctttcccatttttaattataatgcattaaagtctatagcttaatctatcaaaagggttatttcaataaatataaaatgagacatctcaatgctaaggagaccttggatcacagttgaattggcagtgttttattttttcttagtgggagataaaataatgatgtgttcagcatgggaaggcatatgagatttgatcaaatatcttctcatttgctgttttaaagatagagaaggaattaacctgtttttatttggtgacggactaagctaatatttttcacgtgtgatctcatctaatccttataaaataaactttaacacatgaggaaataaaagcaccaagaggttaaatacctgagtccacagaccttgtaaatgcttcaggactcagtctatttggtttgttccatatattagactacttctttaagcttaaagaagtaaatattagatactgtgcctagtatatgccagagactattgtgagcacataatgggattaacttgtttaattttaataatcccaggaggtaggtactccacctacttctattttagaagtcaggaaactgtagcacaatgagatcaagtagcttgatcaaagtgacttgaggtgtggaaacaacagaatgcagaagcctggctttatgatccattactcttagctgctatattatataggctttatcagtacaagtctttccagagatttatgaattctcctgccacacccttccatggccacctttatgactgtatacaaaatcattgatacaaaggtagcaatacaataactctcttttaaaaaacttttaagttcaggggtacatgagcaggttacataagtaaacttgtgtcatgggggtttgctgtatagattatttcaccccccaagtattaagccaagtacccagtaattatttttccagatcctctcccttctcccatcctccacccttatagcccccagtgtgtgttgttcctctctgtgtgtccatgggatctcttcattcagctcccatttataagtgagaacatgcggtattcggttttctgttcctgagttagtttgctaaggataatggcctccagctccatccatgctcctgcaaaggacatgatcttatttgttcttatggctgcatagtactccatggtgtgtatgtaccatattttctctacccagtctattattgatgggcatttaggttgactccatgtctttgctattgtgaatagtgttgcaatgaacacacatgtgcacgtgtctttgtggtagaatgttttatattcctttgggtatacacccagtaatgggattgctggattgaatgttatttctgaatttaggtctttgaggagtttccacactgtcttccacaatggctgaaataatttacactcccaccaacagtgtaaaaggattcctttttagccacaaccttgccagcatctgttattttttgacttgtttaaaatagccattctgactggtgtgagacagtatctcattaaagaaatgcaaatcaatactaaaactcttaatttgctatttatgtttttttaaggaacttcataaagtaggggcatgtatgtaaaattttccaaatatattaatttttagtaagtatgggaggcgtaggtataaaacatgcaaaaatgaaaatagagtaatggagttaggtagtaaaatagtttagcaattgattggtttggctctgcgtccccaccgaaatctcatcttggattggactcccataattcccatgtgttgtgggagataattgaatgacaggggcagtctcccccatactgttctcctggtggtggataagtctcatgagatccgatggtttgataaggggtaatccatttcacttggttctcattctctctcttgccaccaccaagtgagaagtgcctttcaccttccaccatgactgtgaggcctccccagccatgtggaactgtgagtccaataaacctctttcttttgggaatagaccagtctcggatatgtgtttatcggcagcatgaaaatgaacaaatacaccagtagataaattattttgcttaatgctgctacattttctaaagctagctaattacatctaaagataaaaacaagtcattaccatttagaaaaccccaatgctttaatataacagacttctaatcgataaagcaataatgtatgatgtatgaaagtcatacaaacatgagtgacaaggacaccaaaacttatattggttttctctcaaggatattgaaatcaaataggtgattcattttcaatacaagcataggtgcagctaagactaatttaaaacagcaaaatgtgatttttgggctaaacacatatttaatccatttttgtaagaaaagcactgattttgcttgtcatgaagaaaaagaaaggttcaaacagttctagaaaataatcctgaacaaaataaataattaagaactggtttaccatttaaaattttattaatatgggttggtttgtgaaggtttcaaaaactctagaaaataacaaaatatttctgggtgtttcacaatacttagagtaagtcaaaaatgaaccgaaagggtttgcttattcaggccaagcatcatggctcactttgttgtataatgtcgttgtctctcattgacagtcctgcgttttcggagagagcacagccctgggagaaacatcccattgcctgttggatgatagggctgcattagacatttcttagtctgccaagcaatacctcagcatcagttcaaaatgaaagggtgtctgttaaacaggagagctggggtcatgaggttccacaacaaaggctagaaggatttgtggaggccgcttcccttatcagtggagtgattggactgcagcttggatgacacgaaaaaaaaaaaaaaaaccttgctttctgattgttttcaaaaattctatggaaggattttcttctaggaacaaggtttcattttgttttgtccctctgtcctgatcatttctaagttatctggatttaaaaaattttaacattgagagaaagagaaaggtggggtttacttacattatgaacactctctcattcacgaactatatcagaaccagaagacacagagagggatgggggttttccttctttatttcagtcagtacttgggcaatttgaaggaggcacaaaagagaacaggggatcttaagcaagtttggtaagtccatctcacaacaccccacactcagagtcatactgaatacacagattcatcactcgctctctcaggtatcaacttggagggctgacgtgacctgctctatgagagggaaagtgagacacatcttcctgcatggtccctacctgggaagatattgaaagaggaaaagtcaccgggcacgatggctcacgcctgtaatctcagcactttgggaggcagagacgggcggatcacgaggtcaggagatcgagaccatcctggctaacacggtgaaaccccgtctctactaaaaaatacaaaaaaaaattagccgggcatggtggcaggcgcctgtagtcccaactactcgggaggctgaggcgggagaatggcgtgaacccgggaggcagaggttgcagtgagccgagatcgtgccactgcactccagcactccaacctggttgacagagtgagactctgcctcaaaaaaaaaaaaaaaaaaaaaaaaaaaaaaaaaaaaaaaagaaagagtcactatgacatatggctttcttcccattttctactcatttctacccacacagaaaggagatgctgagagagggtctgtattcaggtttttccaaataaggtcttcggcataggctgtatgcatttccttagatgtctactgatttgtataaagagagtgtccttaatacttcttcacctctaggatcctacttttcatcccttgagaaaagatgaagcaccatcatgttcaaacttgcttggaacgcctgtcagctgagaacatttatccccagttgaaatttttaccaaccaaactcttcaaacaacctgtcttcatttttgtctttcacttgagttaacaccaaatgaaaccattgccctacagacggggcctgataaactgactctcacagagagaggaagggcttctatggattcacaagttccttcaaatatgtgtctgggctgggcagcaagcctgcttcttcagttcctgatcttaccatcaatagtcccttaatggaatggcaatattcttataattgggtgactttatttcttgccacttctatccatggatgttcaagctagaaaatggataatgctttctactattaaaattgatcttgtatgctatcgcagagcccaggtaaatgaggctgaccaaaatcaagctgttaacaaattaacaaaagaaatcccaaaataagtacataatcttaatcccaataaatccaatggctttacttttccaaagttggtgacatactgaaatgcatctgctactgacaaaagaaatggcaaattccaaaatgtggcaacatataaacgcaaatgtcaaaaaccccattatggtgacatttcactctgaccagggagtaagaagtggatttcctggcagccaggaagttcatttcaattattttgtagccacaaagttcatcactctgatattgatacacactggaagatctgcttgtgaatccctccttatgtaatagcaattatttttttctagcaatcctgacttcataaagtaataatatctaagtattaaaattaaatttctctttctctttcatcatacatatatatgtatgtatatatacatacatatatatatatatacatacatatatatatatatacatacatatatatatatacatacatatatatatatatatatacatacatatatatatatatatatatacatacatatatatatatatacatacatatatatatatatatatatatatatacgcacacgcaaacataggcacatagagcttttatccccctagctacaaataacagtaatttgcgacgattctaccaggttgcatcttaaacatgtatatctccttctcatttttacttccaggaatcataacatgatttatatttaattataatatagttgtgaactactatatattttaaaaatatttcttcctttatattagttttagattttaaaaattagtgatgtttatattgtacatttttatctgtttagtaatatttttgaagtaagcataacagaagcttatcaatgcatatataagaagtccatctttctgaaactttatttatataaatacgactcagtgacctaaacactgtgacatacatatagatggggaaactgaagtttggccactttgaattaagcaaaagtgaaatacaaagaaaaatgtacaaagagggttccccttcatggaagaaagccactgcctgatacgaagaacctgagtgataaacgatcctgaaaactgcctctgctctgctgcaaaggtgcctgcaaaagttccacttggctattgttattaattacacatcaagctcacaatgttgcacctaagataaaaagcaagaagaagggggaattagaatttaattaaagcttgtcaagcaggcagggtcctaaatggtagctcacagagagagatgcacagctgacggctacacacgccttccacatcgaggtgctgaggctaaacaaagttccactgaagagaattgtaatatctttccgctttctaattaagttggagaattttttttctttttgccatcttagcctcaaggaagaataccagatcatataaggcactatttcaagcaatgtgtaataatgatgaagtttctttcttttttattattattattatactttaagttttagggtacatgtgcacaatgtgccggtttgttacatatgtatacatgtgccatgccggtgcggtgcacccattaactcgtcatttagcattaggtatatctcctaatgctatccctcccctctccccacaacagtccccagagtgtgatgttccccttcctgtgtccatgcgttctcattgttcagttcccatctatgagtgagaacatgcagtgtttggtttttcgttcttgcgatacattactgagaatgctgatttccaatttcatccatgtccctacaaaggacatgaagtcatcatattttatggctgcatagtattccatggtgtacatgtgccacattttcttaatccagtctatcattgttggacatttgggttggttccaagtctttgctattgtgaagtttcaaaattaaagtagaaataaggcacacccttgattttgtttcaaaaaaaggatttttctgtaaaataattaagtccatttaaaaaattttgccaaaatgcctgtttagaggatataaaaataaagtgtactcagtctaactgccttaatcgtctaaagaaaatgtcctaaatatacttacaaaaattaattaacttaggcaagagagagataacaagggctaaacatgtctttatttccatttatctgtaaaaccagacacttaagattgggagggattaaatagacaaatgaaaatcaaatgaatgatatgaaaccctgtgtcgtagactgaatgtttgcgtccctccgaaatgtatatgtgaaaatcctacccattaaggtgatgctattatgagatggggctttctggaggtgagtaggtcatgaggatggagcccttgtctctttctgtctctgccatgtgaggacacagctagaaggcaccatctataaataagaaagcagggtctccccagacatcgaatttgctggcaccttgatcttcgacttacagcttccagaactgtgagaaataagtttatgttgtttataatccaacaacttaatggtattttgttacagcagctcaaaatgaataagactccctgggagctgaaatgccctgaaagacctctacttcatataaccacaggagtagttaacatgtgtaaagtgcttatgatatccaagtgtattctgaacacttgacatatagaaacttgtttaatcctcacaataacctgtggggggcttgatctcgttgcctctgttttacagagggcagaggtgaagtagtatgctcaaatgaatattcacaaaataaactagtggtgacagtagtcaccctactctgaatcaaacattggatttctacaatgtttttaaactggtggagtcggcagcagagccccaaaaatttatctccagatttgctgctttcaattcctgtgctttaacacatccaatctatagcaaaatactcccttacatcctctaaaaaggaacaccaaagaattacataatcatggcggtggggggggtgaaaagtgtggatatgtggcatctgtcagcatccccagcaccaaatgggccctcagaagtcagctatgacccgcgtcctgcgtatccaaaaaggaaatactctatgtccatatttcctctctgcaaagagatcgccagttccttcctgattcccctgtccttatgataaaacgacagaaatcctttcctgcagaatgtgcatgccttcagcaattactaaacatttttttatttttgagactgagtcttgctctttcacccaggctgaagtgcagtggcgcgatcttggctcactgcacgtccgcctcccagcttcaagcaattcccctgtctcagcctcctgagtagctgggaatacaggtgcgtgccaccacacacagctaattttttgtatttttagtagagacggggtttcaccatgtcggccaggctggtctcaaactcctgacctcaggtgatctacctgcctcggcctcccaaaatgctgggataacaggcgtgacacactgcacccagtctactaaatacttcttacatattttctacttaaggtgccctcctttttctaagaataagcaaggagctgcagaaagttctgggaaaatgtctcaaagattcaatgcataaggaaaaacttatttgagtattttgctgttgtttgcttacacacatccatgtatatttcacatgcaatccccaccaaaacatttaccattcttcaaagtgatgctcaaagtctttttatatgttcaaaaactataaaatgggtgctgaggggaacaccatatgccccaccagaaacgagaggtggttggaatatgtaaagaattactctcaatgattgtgtggcagacaggctatgaaggtgccaccctccccatccctgccttctggagtcataccttctctttagtgtggcatggcctgtgacttgcttctggtcaacaaggagctaaggtgacggcatgcgtgtgagcacctatgtttgatctggcaggtgagattgcagcaccctccctgctcacaccctggctggcagggaagaagcagctgccgcggtgtgagatgtttgccatgaaaagcagatccttctttagtaaagcctgagaggagaacatagtcaggctgccacctgacttgcagccttgtgaggtcgtaagcagggtgcccagccatgccttgcccagactacgacccacagacaccgtgagatcattcattcatgctgctttaagccactatgtctgtgatcgtcattaagtagcaacaggaagtgaatgccaattgcctttgccacaaaattgttgtctgtctttccaggtcaatttacgatactcaggtaccaattttttttttttttttttttcagaccgagtcttgctctgtcaccaggctagagtgcagtggcaggatcttggctaactgcaacctctgcctcctgagttcaagtgattctcctgcttcagcctctcaggtagctgggattacaggtgcccgccactgcagccagctaattttgtgtattcttagtagagacagggtttcaccatcttggccaggttgatcttgaactgctgacctcgtgatccactctcttcggcctcccaaagtgctgggattacaggcatgagccaccatatccagcccagatatcttgtaagtgcaaccattgcttaatgtcccctaacttagtttctaaggaataaaatgtgtatttcacatctgtcctatctactattggttttaacttttagttttttaatgacaactgattaattactttaacaatttaaattacatatttattcatcacattttttaaacaccagccacgttccatgaactgtcatagatgctaaggatatgagatgcagaattcttctcatcaaggagatcacaaacaagagaaagaaacaaagactgaaatcaggagagggaaaaatgcccatttgacccatgctcagaatggtcttaatatacagaagagacaaataagagactcttaacttcaggtgcatgggagacaacagaggccagaagccaggataacccagggtcagattgtgcactagctccactaggtcgggcatattaattcagttctaggtgtttctgttttctcacaaataaagtcggaaacacattatcctcttgcttatagtgttacaggacgtgatttaatacacacaaagcacagcagtggtttctaggactataacttatcacaggagtggataagggagagttttagaagaaacaagagaactgttatgtgaaccacagggaggagttcacaggctcacagtgtattgaggctagggacatgtaggcagctcctatggtacctggctgtggtgaggcggtcgcctgccaggacctaataagacatgagctattaatgggtactaggcttaatatgcgggcaatgaaataatctctacaacaaacccccaagacacaggtttacctatgtaacaatctgtacatgtactgctgaacttaaaatacaagttaaaataaatagatacaacttcaatactaaaaagaagaaagaaatgaatttagagagaccatcacggaagatcccaagaggagatgcctgacgtgccaaggagtgcagccttatctggaaggggacaagtctgggcgcacgtgtccaggattttctagcaacatccattatagcgatcagccctgggtttgcaatacagttaaccttacgccctagctgtgataaggtcagcaaaactgcctgtgaaaggatatgttaaacagctatggacttttgttggtgtatcattttggtaacttcacctccttcctcccacatttcatagtctgtctcctggaaaatgattttgcaatgtttaaaaaaagtgggcaaaaggtctgaacagacacctcatgaaaaaagatacaaggagagtaaataagcatatgaaaagatgctcaacctcatgtccttagaacatgagacaccactacacaccaatgaagaatcgctaaaatccagaatggcaacacaaccaaatgctgttgaggttgtggggcaacaggaaggctcactcactgctggtgggaacgcagaatggtagagtcacgttggcagacaagtggcagtttcttacaaagctaaacacagtcttactgtacgatccagcaactgtcctctttggtctttatgtaaatgagttgaaaagttatgttcacacaaaatctttacaaaatatttatagcagctttattcataattgccaaaaattggaagtaaccaagacattcattaatagatgaatggataaactatggtacatccacatagtggaatattattcagcaaaaaaaaaagaaaaaaaaagaaacgacctgtcaagacacaaaaagacatgaagaaaatatggtttccttattattctttttagatacagggtcttacgctattgtccacgctagagcacaggagtgcgatcatagttcactacagcctctgacttcaagggatctgcccacctcagcctcctgagcagctggtactacaggcatatgtgagcatgctcagctaacgatttaatgttttgtctacacgggatcttcttatgttgcccaggatggtctcaaactcctcgcctcaggtgatccaaggagaaaatttaaacacatattactaagtgaaagaaggcagtctgtaggatgccaaatatctgacattctggaaaaggcaaaactacggaaggtgaactcaaattatattttacatcacaagtaaacatgagcttagattcctcagtatatataaagttgatttcttttaaaccacatctgatcattataatatttctcacatgatttgctctagtttttagaagtgaaaacaatataatcgttttcagtaaagggattaaatattttggtttaattatgtccatgaagcactagtgccgcctttggatttatatttgatcaaaatatgtagacaactgaaggtaaaaggatttttgagaatgagtcgtcacatgtagacccatggaaactgaccatgggcacaggtaacacccaagcaactctatgggacacaaatctctttccatacagttcttgatccttattcagagcacacagtaatttactccagatgctgcttctcatgcatactttgttatacagaacatgcttgaaaaatacatttttcatttaacatgggcctgtgctatcaattagatggaagaaactgtcacaggcagtgaaaactcttattaaaaattgatttgagtctagttaagtctcaacacccaattccgatctgaagatcaaggttgtgtcagaataaaggccaaaagaaaaaagatcaatattaaatatttcagttctgaggttaatacatttgcttataaaagtatactgaaccatctgtattctggaagacctgctctggtaccgtaagaagactagatttttttttaaaggcagcaatagtattcttcaccttaagacagtaagcgttatatacctacattggaagcacaaaaatatattaggtaaaataatttaagattgtcttaacaaataattgtcattcttcctaaaagttaattttaaaatcctaagagagagagagtttgtgcgtgtgtgtgtatgttcactcttaactaggcacctaaatgatggttgttagtttggtaaaggattactactgatacaaacacattctaaagctactgatggtcgggactggtggttcacgcctgtaatgccaacactttgggaggctgaggcaagaggattgcttgagtccaggagttcaagaacaccctgggtaacatattgggatcccatctctacgaaaacatttttaaaacattagccaggcaatggggcatgcacctgtagtcccggctactagctgaggtggggagattgcttgaggccaggaatttgatgctggagtgagctatgagcgtgccaatgtactccagatcgagtgagagagtgcaactctacctcaaaagaatatcttaaaatatcaaaaacaaaaacctaataattcaacatttaaaaataatttaaatagaatcaactctatccctaagaatagtatttactaagctgaggaggagccactagaggacatcattcacagcaggacacagtttttatttagttccagccatgactgacctcatataaagaagcaaagaccaagaaattaaaatgatagacactaacaactgacttgaatttttaaaaattggttaaaaaggtcaacttggttctactgattaacttcaaatgccttaagcatgtacacatagatataggagaagacctcagaggccctgggggaaggaacatgaatggtattcttgggtcccatcctatctagtggacaacacaaggcttccaaagggaggtgtagaaaaatgaagagagttagagtagagaaaactggggtaagatattgttgtttcaaaaaccaatattcctgtcagccacataaatgttaagaaaccagctctatcttccttaccaaaaacagatttccatgtaaactgaacaaacgtaaaggaagaatgtcatttactttcttcttataactttcatagacaaaacatgtaggttagtagttattttcatggccatggtaaattgcaattgctcagtgacatttgagacttactaaagtgaaatatgaatagattttctattttaatattcacaagtcagtttccctacaattagtttatcgcatatattgcttgaaaacattattatactttcatgtgaagacaattctatccaagttttacgtttattttacaacaataaattgcttctatctaataaacattattggagatttatctgggctatggattaaaaataatgcaagtcaataaaacttcacaaattacactaactatgggttttaaaagaaagttcgcttcatccacatttttgttacttggcatcttcatcaccattcctgccattaaaaaaaaagaagcctttgaattccagtcagttgggttaagtatgcaaaaatggctgcatagattgtcttgttgattacctattctctatcatgattatatctttctataattttgtggaaaatagactaggaaagagaataaacttagaaaatagagtcagggtaggtagcaattctacctgaaacatggaaacaaaagcttaaaattctcattgttaggacaaattgaaagaagaaaaaatacgcagtgatatacataattaaaaggcagcagaaaaaaacagtggagaaaataaagaaaagaagtactaaagagggagaaaataaataaaagcaacaagagatcacttagaacgtggcagaaaagcactagggacagggagacaaggaaagaaaccagattcactattcaccctgcttctaaaacacatggacaacaggcagcattattataaacaagtgaggtaggaaccgggacttccattatacttagcattacccagaatttcatgagaaatcctgggatttttataaaaggattaataatgggaaactacctgaaaactataaattgctgtcataaaaatgtgactaatacaaaatgatttctcagctgggcacggtggctcacgcctgtaatcccagcactttgggaggctgaggcgggcggatcacgaagtcaagggttcgagactagcatggccaacgtggtgaaaccccatctctactaaaaatacagaaaattagctaggcctggtgacgtgtgcctgtaatcccacctactcgggaggctgaagtaggagaattgcttgaactcaggaggcagaagttgcagtgagccagtatctcgccactgcactctagcctgggtgacagagcaagactccatctcagaaaaaaagaaaaaaaagaattgctttttagggcacaaatattaaaatgtatgctgcagaccttgtggaagaatagatgagataaaaatgtaagtaaaatactatcaaattatctggcccaagaaaggttagcttccctccttataggagagttatattgttgatttggtgagatctccactaaatattttaacattcaaatatactttcttaatagcccattctagctaacatttgtcatagcctctttatcaacaaatattagaattattaatgtaagtggatttcatttaatttttctgtgttttttgctccatcttaccctcctaaccccaggttaggataaattctatatggcaaatgacaagaaccaaaggtctaagtactccaaagtgcaaatagtctggccttcagcaactgcgactcgtgtaattcctacagagatacttaatgtggtcttaattggcactgttttctttttcttttgttccacttaaatgatgccaatcaaattttggcatacatgagctaagttaaagaaaagtagcaatgcctagttttgtcgactcgcaattcctttgaaaccatactatgaagagaaaatttaaattccatgtttatcctgctcattttcacttttgcaaagagaaaaaaacaacctgagttttgctatctgtgcaccacagcagtccgtggctgggataaggtggattgaagtgtgaacaatggttcaggatcaaaggactccttaggttctgctcagactgcctccagtgatcagcagcgcaggagtccatcctgacagggggctggagagagctgatgagattcatgtgccatctcagaaagaaaacataaaagcctggacattctatggaaggcaagccaagagaacgtggaatctccgtttgcggaacttgtaagtcgggtaatataccagggagtatgttaacacggctgaatgacctctgttttgaacttcgcctcgcctcctgccttctctctgctccttgtggctctcttgttattgttattcctggtttgttcctcctctccctgtctcatagctccttttggtctccccctccctttatcctgccactctgacaaagcaggcacagcacttgcattcaatcatcagctgaaaatgagtaaaaagctacttgcctggaacaaagctgggagtaattttgaaagcatttccttagagctgagacatcctgagacatggacttttgatgggtaatcaaggtttagaaaaatgagttcacagaaggtttacaatatcaggacagatctttcccaggctttccagaccatttaatgcttgttttgtgaatcaaagagcgcaggcacagaggctggaggaagcaaactaatagcttacaaagctacaaaacgaaagggagacaataaggcttgaaaagaaacacttacaaaaataaaataaaatacccatttcctctctgtctctttctcctgcttctgtgagtactgctagacagacgccatcgacatttcagcagcagtgacatcccagacagcttgtctatagcccttgactcagttttttggtatttcttttagtagaatattccagagcatgtggtcttttacctttccttggcctccagactgtgctactcctggatgatcacttcctctaaactcatcttcatcatgatgttgaatatcattacttctttgcaacccaaagcaaggaattttgaaacgattatctctcacttgacaaagtaaatctatttatatagccactggcctggcactacaaaaaaatcaagttcttaataaatgctgtcaatgattgtattttggggggaaatattaaccgcttttcaatttatgcataacctttccaggcccaattgtgtttcacagttataacctgtcatctctctttagtctcctttcccaaatccagcttgttctgtatatagtagctccactgaggagcagggaggaaagacggatgagtggagtacacatggtggatgctgccatttaggcaaaggcaggcatttaagtaaagacaggtaagaatgggaactcgtgccccagtgaggaaattaccatactccaattaaagggaaggcagagcataaatagtgtgcaagctaaaaatacacaactcctttcagcacaaagctccccgaaacaattctgcaagaaatatgtgtaaggtctgaagcttagcagaaagattggtagcaagcacagctgtccagaatcaacggtagaaaaataatttctttttctttggtgcagtcgtagaaatgctcaggcatcctgttggcgtttgaatgcatggtgccttcaagaagctcacggacacagacctgcaactgcccgtggggtttcctaaagacacaacaggagcgacgtctgcgtgtaaaatgacaagtacagtaaacgtcccgcagccccaggcttcattgtcatctgctggaagtgtcctccatgtgtgtgagataccctgcttatacatctattttagtcctcaaacatggaaataatccactttgtcctttgtgggacttaaagtaacctaatcggggagggacacgcagttatctttctactgttaatgctaacccaatgcttagcagacggggttgaacgatgattgttggctgactcaactcttgcttagcttccatcaaagtacaaactacttgtttccaaggttatttgtgagtgaggttgatttctattttatttaactatttagacacacacacgttaacttatttcttatgtatttatataatcttatatagcatgtgcatatttttgtatatatttctaaatcagttcataatattaatgcatgcttcagaggcatttacttaatttttaattttttaaaatgaattttagttcaaacttttaattttaaaattgatttaaatcactaaattaaattgaattttagggagggataggagaaaatgtccagactcgtactgaaacttgcagaaagatgattcaattataaaatagttcattcaaaatagtgttgtcaaggtaaaataaagttacttctttctaattttatctgcaaagagggagctcatgtttatcgagtacctactttgtggttccagacagttagctaagccctctgaatgcatcaactgtaatctctaaaagtagtcaaccttcattttatagaagaggatgttggccaagctaacagagttattaccgagattccccctggagacttggcagctaagggtaattgtctttggtttctatgcttactacaccccagaagtcaaaataatagcaatgaagatgaaaatgatttagatcacagggctcaacattacatacacatggccagtggttctatacaaactgtaaagctaaattccttagaattaaaaaaaagtaattgaaacattttctaattaattacccaggcatagaaatatctagtacagatctcttaagaatacagcactgatgaaagtgctaaaggacacagaaatgaaatgttaaaatgcagtcatttctgtttagggatttaaaccaagataaagaaacaaaaccaacaggaagatgccatcaaaggaaagcaagacagaaaattgaggagcctcagaaagacttcacaaacaaggtgagtcttaaataaatcttgggattctggataagcacaggaaagaagaaagcagcccaggtaaaagacgtcatgaaaaacgcttgggattaagaaccagggagatgcccatatggggaagtgtgagctcttcctggtacaatacaagcaggcaagtctgcagagaggggtcaggttcttattactttattgaggcatgcacacatctgacagacgaaactgctcttccacaaagagtgattctgaaggtcctgcttggtaaattgcaagaaccagcaagactttcaaggagttactttatcaactagtttaaacaaggtggataagcgataacatataagagggcaataataaaacaaagatattaattctgtaaaaggtcaacagtggaatacattattacttcattatatttatcgcccctgcgagtaggtatgttataaatatcagattttagtgaataactttaataaatgcatttgaagttaaagtgaagttgatatgggcattgacaagaatattagaaaaataagaaagttagtaaaggtgaagagagggaaggaagggaagtaaatttgcatacaagagctatactgagatctttaaagtaaatgtatttgttaagcaggtaaatggaaaatatcaagggaaagtaatggttagtattgtattcattgccacagatgtgatggctgagatgtgagaataaattatctagggtagtatgcatggaaagaaaaaaagcagatatctatgaactaaatcccagaggacatccacaagagagaaagaagcgggagaagttgtaggaggtgaaaagtataaagaggctgggagaatacaatgtgtctgaagagaagttatactaggtgaaaaggtataaagaggctgggagaatacaatgtctctgaagaggagaagttatacgaggtgaaaagtataaagaggctgggagaatacaatgtctctgaagaggatggaactccagggagaggttggcttagtgaatataaacatcatgtaagagagatcatagaaatggatcgtcagcgagtgtcaattatgccaatttttgtgcataggttaccagggatattctgtaaccaccacacagtagaatcactaaacatataataataaattgagacaaatgtgttcatatatcacagcccgaaaaaataatgaactattactgtagacaaaaacttgcgtagatcgtgtaaacaaactattgaacaaaacaccagaaacaagagaatacggagtatgactccttttgtgtaaattgaagcatttaagatgaaggaatctacagagtttatcttgggtgccacagactgttactaaaaagaagaacaggatagctgttctaatggcattcggggaactggttgtttttgagcgggagagagggacgaaagtgagaggtgttagtaaatgttctagctctggacactgtgggagtggtggaggttttcctcttgcgataaagaattgagctgtaaattttacttttggccagtttctgaatgtgtgttatgtttggcaattttaaacaggtttctaaaaaggaggcatgttgacttacggaaaacatgggtagaggtccattgcctggaggatttctatttatctgtctctggcgtaaccttattccacgttctctgcactaaacaaaggtgtttgtataaccagtgatcttttacaacttgagaacgagtacccttgtttttgaccctttgatttgtatgcaccaagaggttgatgatgtccaaatggaagttattattatttgtttgggagtaactaccttgggttatgacatctgagacagtgggccaaaaaagatataataacaacaacaaaataaaaagggacaaccatgaagaaaaggagtatcatgacacataatgatatctcacatatatgtgtatatgtttatgtgtatgcatatatatgtatgtgtatatatacacatatatattaatatcctctataacattgctgggccagagatagaatttactgctagatagtttattcatattgtgatccccgaacaggatgcttaaaaacatgaatgattgttttgtcttaatgtaagattaacggtcatcatctcatttaaggtattctttttatttttattaggcatcatttaaacaactattttaggcaatagaacgtagagcaaagggaagactttgaagaagtcgaggtggatatttcaagaatacttttctcatgtcaacataaactctcttaaatgtttcacgtgttctcctcatctgcagtttcactttctgtggtttcagttacctaaggtcaactgtggtccactgaggtctgaaaacattaaatgaaaaatttcagaaataaataatgtataagttttaaattgctagctgttctgactagcgccatcccactccatcccagccaggacatgaatcattcctttgtccagtggattcacactatctacattagtcacttagtagccatatggcttttcagactcatggttgcagtagtgcagcatttgtgttcaagttgtcgttatttgactttataacatgcaagcgtagtgggccttatttataaatgaacctttatcagaggtatgtctgtataggaaaaaacatgctacatgcaggctttggtgctgtcaaaggtatgaggaatctactgggggttttggaacatacccccctagaataagggagagaactgtatttagaggtgtaactgaaatgcattttaataatgggcatgcaagactcaggctctaacctttgcagtctgaagttaagaataacaattatgtccacaaacaagttaaaaaattatttctacatatgttacctacaaacctacaagcctaccaatctctaaatttctaattatgggttatatatgataaaaataacttcatgattactcctaaaacagtaatcattcttatgaacagaaacattttttttttactattgcagtagaatgagcagaacgtagaactagaaagttctgggtgcacattcttgcactcgcatatcattttagattctccgaggctcagtctttacagtaatacgaggacaaatgcatagatacaatggcaattctataaagtccctactgcagtctctggcatataataattgctcaaaacaaaaaagacagagagaacaaattctttcccaccctttgtcagtgattatagctgacgaaatagtaatatttctccaacaacagtcattaccaaattctgagggccatgaccacgtcattccatgcaaacacacattaaaccccataagtgctctacattatgttatttcagacaaaaaacttgtttaaccattgccactcctcattttaaaaaaggactctatatatcctgaaatctcgcatttacttttattaatttttaactatagcatttcttgttgagttttcttttctctttgactttagtttcagcctcatcagtatattaacagcagatctttgcttttatttgtgtatgatggttgtagacagtacattccacaagagcatgaccaatctgttggactcaccagtaaatccccagtgtgtatgacggtgtgctgcccatagtaggtactcagtttttcttttgaaagaaaaagtttgattgaaaaacagatcaaccaattccttctggtgtcttttaaattatatgtctgtttggtctctctgtctctaaatggtataagagattaaacagcctgaaaatcaatattttctggcacaggaaataaaaaaagctatcataattgaaacgtttatgaaaataccttttacttaaagaactatagttctgtaaaggtgcataaatgaacaagaactgtgaatttgaatcttagagaactatgtgtaatggatatgctttttttacgtgaagtgtgcttttaatatatagtctctcttatcatccgtctaagccaggtaattcctcttgtactgtaaaagtctacagcgtcatagtgtctatgatcattgcactttgccatggcagcctgcttgacatttatgataagaaggtgttgaagtatttgctgtcattcattcaataactattgagtgactaccatttaacattttttatgcctaccatcatactcaacttttgctcaactgttttgaatgtatcagctaataaaataagtcgagaaaatacatttatattcgcaatatgtttccaaataaatttagaaaaagatacttacctatacatattattatattcttagaaaatccaagcactcacacctgagacaccgttaaatccaataaatgattttgtcaaatggattggtatatgataaacatataaaaataaaaataactgcattgacccagccagcttgagtaatgatcatcactgcaaccgaggcccaacacatgattttttgctaacttggcctgatgcattaacctggactcgtctaatgaacaagtgggagctggaaattaggggacagaaatggggagattcgggaagctggtctgtcctatgtctcgggaactatcaggcactgtgacaatgtgaattattgtcatcacctatgtgcggcttttaaaaggcatttttctcagagaatattcttgatggaatcactggtaaacaagagattttcctctcctacctgattctgcttcaaaattaaaccgaggtctgtaatggaatcatcacataatccagcaacactacttgcatattcaaaaaaaaaaaaaaagaaaaaaaaaggaaatcaggatgtcaaagaggttatctgtgttctcatgttcattgctgtgtaattcaaaacagtggaggtacagaaaaaatcctactatgtccactgattgatggataaagaaaatgtggtgtatatatagcccatggaggattactcttcactcttcaaaagggagatcctgccatagcaacaatatggatgaacctcaaggtcattatactgtgtgaaccaagtcagttacagaaagtcaaataccgtaggattccatttccatggggaatctacaatgcacagaagcagagaaaagaatggaggttgccaggtgtagggaagaaaggaaaatggagaattgctatttaaggggtacatggtttgggttatatctgatgagtatgttctggagatccgatgaacaacattgtgcctacagctgacaatagtgggttgtacacttacaagtttgttaagaaagtagatctcatgtgaagtgttctttatttaagttctggaatacatgtgcagaacatgcaggttcgttacataaatatacatgtgccatgatggtttgctgcacctatcaacccatcatctaggttttaagcctcgcatgcattaggcatttgtcctaacgctctccctccccttggcccccacctcccgacaaaccccagtgtgtgatgttcccctccctgtatccatgtgttctcattgttcaactcccacttatgagtcagaacatgtgatgtttggttttctgttcctgtgttagtttgctgagaatgatggtttccagcttcatccatgtccctgcaaaggacatgaactcattattttttatggctgcatagtattccatgatatatatgtgccatattttctctatccagtctgtcattgatgggcatttgggttggttccaagtctttgttattgtaaacagtgctgcagtaaacatacgtgtgcatgtgtctttacaggagaatgatttataatcctttgggtatatacccagtaatgggattgctgtgtcaaatggtatttctgttctagatccttgaggaactgccacactgtcttccacaatggttgaactaatttacactcctaccaacaccaatataagcacaaatccaaaaacagaaaaacaaaaccaaaccccacaatgataaaaacctggtggctttagcttgcattgtttcctctagatttaaataatccagttagaggtcttgatttgtagagaaagtttttccttactttatgaaaaaataataatgataaatgtgttctttagaacagaggaaaatcaccaacgaggtaaaagagaaacagaaaactgaaaataagtaaacaattttactcagagatcactgaacctaattctgtaaataaatttctaagatgataaataaagatattaaatcaataaaactttgaaacaaaatatctcgatttaaacagtaataattggtattttatttcagaactaatatgctattataaactgcttaatcatttaatttaatttttctgattcctcagaatcttgatattcatatactatcaaaataatgctattggaatggatttcttacttaataacttagccttgtgcttttcagagagaagtttctttctttctaacatgaccaaaacttgcagtccagtgtccatgttgctccagttttgctgagggagttctaagagctttcatttcttcatctgccaatgaagcctttggacagaaccctaagctacaactcagtggcttgtaagttttgttcttaccaacatatgagttccacactcatgttcaatatttttttttttttagatagagtctcactctgtcacccacaatagagtacagtggcgcgatctcatctccctaacctctgcctcctgggttcaagcaattctcatgcctcagcctcctgagtagctgggattacaggtgcatgtcaccacgcctgggtaatttttgtattttagtggagatggggtgtcaatatgttgcccaggctggtctcaaactctgccccaaacatatttttgaacatctaacatgtaaagcaatcaaaagccattcgaataaccaaaattaattaccacaatagtctttctaggagttgccaacagcccagttactgctgtattagattggtgcaaaagtaattgcggtttttgctattgaaaataatggaaaaaatgacaattacttttacaccaacctaatagaaattacagctattggagcacctcactaatgtgttccaggaacagacggattcatggaagcttcggtgatgaaaaaggaagagtaccagctacccactgaaacccacggtgggttagaccgtagcacccagactccttttccatgagcccaagtctagtgcaaaggggagagagagaaagtgatgaacgccgcacttcaggcctagcccagcaaacttcccactcccctcccctatgctaagggatctgcagcccctcttcattcagaaacaatggcggatggcaggaggcggggttggggatgggaggacccagtggaagggacctgggtctctaaatattacacggagaggaagtcactaccattctaaacactacccaagactttcacatgagcaacaaacaaccttgttttacataagaccctataatttcagtgtgtttttcacagagcttaacctcctctgaataaggagtcagcttctctttccttcagagtgtattgtttcatcagcttatatatggttaaataagcataaatgctttaattttcctgaaagagccacctctaatttacagaataactacacatcttttaaattaggatagaaatccatgtcttatatttgtacgattgataagtttataacataaataattagggagcatttaatttctgtatcttaggtacatttttctgtctttaaaatataaggagaaaggtgatcgaatacatttttttcataaacaaaattgaatcggtgaaggaattcctaagaatgcttttccaggacattttcaaaattccttgccttttcaaaaggaaataaacacatatttagtaatgcttattgattaccttgattcctgtttattatcctacactttgatacatttcataagattaaacttttacattcttccatatttctgaaagtttactgaaaaaaagtattgccatctgtttgttaataagacacaataaaaaacctagatagtagatacccatgcaaaagttagctcagtatattacttattttctctaaaaactattttcattaaattctagctcagcacttaccttgtaaaagaataattgttcaattaacgccaccctaatctgtttacaagactctcccattagatagttggtgctatatataacatagactccaaatatttgttctgctcacattatccagtgttttatgggtgccaggctgtccttatctctggctattgattacaaataagtaaaatacaagagtctaaccctctagaggcttatgatttttaggggagaaaatgacatagaagtattcaattcttatgcatggacatgcatgttatcatagtggcttatataatgggccattggtggaaacatctatttccaattgtgacaaaaaagaaagtttgattaagtgggagatatctgagcaaggcaatggaagatacataaatactcaccaggctgaagagaaaatgacattttcaagctaagaggtagatcagtttatctaaagacatcttgatgattgtctataagagttgtaatgaaacagaagctttatatgagaatgtctgcttgtatgaccaaaaggtttctttggagctgaaggaaaaattatacactggtcaatttcagtttaacatctttgaaatgaaagtgaaagatatttggaattatgtgaataggcagtgaaaatagtatcagcaggaggggaccctcatagtagagacaagtgtgagaatcctacgaacacagacaaaactgaacgtttctcagtcacaagagagaaattaaaattgtccctattaaatgagcatctggagattgtgagctatgtagaaaaaaaataccaaaaaaaaaaaaaaccccaaaaaacaaaaacagtgaaattgcagatgtaggaggcaggggaagaggtaatatttttttttttttcaattctgaggaggtgtcattttaagcatctccctgataccgcccatactcagttcatttaacaaacatttatttttcatcagctgtgtgtctcactttgctagatgcattggagtgatataaagataaagatgatatgtttttccttcgagaaaactacaggattgtataagatgggacttccagttagttcaaatatcagtgttaattttgatattgaattttatacataatctttgccatgcttcaaagtcaacccacttagataccaatgaaacaagtaagaattttattccagaatttaatttagtagtattttctttctttttaataaaatcatccaaacgttataaatttgcaagatgaagtttactgcatattaaagagatcaaagagaatcagaatatgccatattttcttttataaataaatgagtcaggagattggaagatgtttcctccttaccaacccccaccctctgaaaaaataatgcttgataacaaggcagctggtagtgggtctggaaccatttttagctgcttcaaaggggaatcagatgtactgaaatgtaaagatgtaaaacactcataaattatttcagtggaatgtcaaaacagccagtcataatatgtctactatttaaaaatattaaattttagtggtttttttttggaatgtaagctttctggaagcttttagtagcatttcttcctagaggaaaatgcctaaataggatggtgcacaggggcataaatcccacaggacaggtccaatgtgagggcagcctgagctttcctgcggctgtgacatggatgtgaagtctgtgttaccagggtgagaaaagacaacatgagaagcaggaattccagaagtgtgagtgcaaagatgatagaagaggagagtgaagaataaggcagagggaaaaaagaaaatacttggaatgataaatgaagtaaaataaacaatagaccttttagggagaattgaagtattaattctttctttttaacaaaatcatccaaacattataaatttgcaagatgaagtttactgcatattaaagagatcaaagagaatcagaatatgccatattttcttttataagtaaatgagtcaggagattggaagatgtttcctccctaccaacccccaccctctggaaaaataaagcttgataacaaggcagctggtatttggtctggaaccatttttagctgcttcaaaggggaatcagatgtattgaaatgtaaagaattaattaaagaattaaatactgtgttccagcaagagcagtaaacctaagccatgggattcttactagacgctgtctacgtctgctacctcctgtaatagagaggaaatcacatggaaatggaaaggatgctggtcaggaaagccagtcctgcagagcgaaagcagacacaccccagccaagtcaccctgcagaccattatcatcaagttctttgtgaggaggaacagtgctaagtccataataataatcacagtcatgctgataatagacacttttgacacttattaagcctcattctaagttctttacatgtgatgatttacttagttgtcacacacactaaatatcatattatcattaccacccccatgacagatatggaaactgaagcattgggatgttaaattgccccaagattcacagctggtgcttagtaggacaagaagccagctcctgtcgccctgacagggtgtttatgtggtttacctgatagaggtatatgaaagccttaaatcactattttatgattttgctgtgtctccacccaaatctcatggtgaaatgtaactcccataattcccacatgttgtgggagggacccggtgggaggtaactcaatcttgggggtaggtctttctcatcctattaacttgatagtgaataagtctaaagagatctgatggttgtataaaggggagttctccttcacacgctccctttgcctgctgccatggaagacgtgactttgctcctcattcaccttccgccatgatagtgaggtctctccagccatgtggaactgtgagtcaattaaacctctttcctttataaatgaccaagtcttgggtatgtctttatcagcagcatgagaacagactgttacacactacaactaaatatttcccaggttagccatacaggtattcttatattttttgtagacaattaaaaagcataatgcctaaaaaaaaaaaaaaaaaaaaaaaaaaaaaaaagcaaatactttgttccaaacatacgctttattaactaagggacaagggaagagacttcctcttctacctcagataataattagcttcatgaacttaggtgagtctcttccctactcaaagcaatcttcccttccctcttcccttccctcttcccttccctcctcgcttccttccttcttgccttccttccctcctcccttccttccctctccccttccttccctcctctcttccttccgtcttcctttccttccctcctctcttccttcccctttcccttccttcccctttcccttcccttccttgcctcctctcttccttccctcttccctccttccctcctctcttccttcccctttctcttccttcccctttcccttcccttccttcactccctcccttcctctcttcctccctccctcctccctcctcccttcccttcccttccttccttccctccctcccttccttcctctcttcctccctctccctgtccctctccttctccgttcccgttcctttccttccattttattagttaagagaatatacttgacaatctctaaggaatgattcaaagtgcctttaacctatgtggctgccttttatttttctcccctctcttgagctttctttctcagccatccttcagcctggtcagcactctcctgttcaattccagatgtgaacagaataccaacataaaattgaacaagttcccaagagtttgttaattttgtttcccacatagcaagcctgcaatagtcatcagtccatgtacagatccatttttaacctgtcccaaaagaaagtgtgaattctcagacttggcggccgatttccagaaatagtcccagggctgggagcactcagcctcacctcatcaactgccctcatagacagcacaggaaagtgaccagaggaggggcatgcaggcttctccttcgcaggagaatacaaatcaggattctttgcaaacttgctggtttctattttctggtttatacagattattgttttaaaaagcagaatacagtttcttctggtttcctgttcagcatgtaagaagctggaagtcaccactctgtcctaagagaaagctccacaaactgaaagatcaattcttcttagatcattcagagaggtgggggtcataggacaatttgctgctcccaagattggagacacatacagggaactacagaaagtgatggtaccagggcagaaacccacaagcacaaagctccagagtgggagtagggaaggcagagccgtaactgatgaactgctgctggctcagtgttccccaagagaactcagtcattagggggcccattcatgacattagttttactccaagaggactcaatcatcaggggtctacacattatgagttttacttcctggagcttcactaggttctcacaaggaatattggagaagagcctcctcctgcttccagcttggggaggggaaaaggaaccatttttgcagagcatttcattcttcctaacaagataggcccacattaccctaacatcaacaccagacagaggcattccaaaaaaagaaaactgcagaccatcgtttctcatggacatggttgcaaaaatcctcaacaaaatattagcaaaataaattcaacaacgtataaaaagaattatataccatgtttcactgggattcatctcaggtatgcaaggctggttcaatactgaaaaattaattaacatatcacatcaacaggttaaagaaaaaatcacatgatcacatcaacacatgcagagaaaagcaattaacaaaatccaatacatatttatgattcaaaaaatatcctcagtaaaccagaacaagagggaaaccttctcaatctggtaaagaatatctaccaaaaaaccctgcagctaacattttacttaatgaaaactcaaagctttctcactaagagcaggaaacaaggcacaaatgtcccctttcaccactgatttccaacatcgtagctaatgcaataaagcaagtagagaaaataaatggaatacagatagagaaggaagaaataaaagttgtttattccctgcaggtgacacaactgtctatgtataacatcctaaataattgagaaaaaaaatcaccttcctagaactaataagcaattatagcagggttgtaggatacaaagttaacactaatgcacaaaataaattgcttttttatataccggcaatgaaatggaattcaaaattaaatataataataccatttacattagcataccccaaaatgaaatacttagatataaatctagcaaaatacatacaaaatgtatatgaagaactctataaaactctgaattaaaaaaataactaaacaaagagatagcccatgttcatggatttaaaaaaaaaaaaacctcagtactgtcaagttgtcagctctttcgaactttaaatacctattaccaagtgaaagaagttaatttgaaaaagctacagagtatatgattccaactgtgtaatattttcgaaacagcaaaattagggaaacagtgaacaggtcagtgattgccaggagttgagggagagaaggattaataagcagagcacagataattaaacaatgaaaattatctgtatgatactataaggatggatacatgttattgaacttttgtccaaacccataaaattgacaacagcaagagtgcgctccaatgtaaactatgggctttggttaatcgaaatatgtcaaagtaggttcattgattgtaataaatgtaccattcttatggggggatgttgataataaaggagatcctgtatgtgtggggacagggggtatataaattttttttaaccttccccttaatttggctgtgcacctaaaactactctacaaaactaaatctagtaaaacataaagcagcaaacatcgaagctactatagcgatgctaatttaaagagaaatcctcaagtagcacctgtaaaattttaattctactaatgatcatgttcaaagcatgttaaaagtagatcccaattctttcatacccacaacaaagatgaaatgtcggactgtaacatttactctttaagttagagaagaactctcgtttcatgaaatcttctagagaatcatatcaagtgacacactgattaagcacatttgtgttaaatggagcatgtaaaagataaattttgaagatgaaacaatgaagttaaaggaagagttctttgcacttgtactcataattgagaaaggtaatttcattttctgggggactttaaagtccacagatacacacacataaacttgctactttggcaaaaatacataaatttcgatgaaaataattattccttatgtacagctggggaatattacttaagctacgctttctctgtgatgtactgctctgacaaccataaaattattttcctctctaggtctgatttttgtgatcagtggttcctaggtattgctaatttgaagtgtgatgtcaaatttctcaaacctgagtgatccaaagaatcacttgggactctttttaaccctagattgtagctaaagagcctcctcatttgtgttagtcagctcagactgccataatgaaataccacaaactaggtagcttaaacaacaaaatttttattttattattattattattttttacagttctagaggctgaagttctagatcaagattcacacagagtgagctcctggtgagagctctcttcctggcttgcaaaatgccaccttcttaccgtgtcctcataaggcagagtaggggatggggaggtttcctctggtgtctgtgcttctttttatacggatataaatccccttggatcaggccccactcttattatctcatttaaccttaattacttctttagagaccctctctccatatacggctatactgcagatcagaagtaaaatacctgaattttagggggacacaggcagtccacaataccattctagaaggcagatctgaatgccacaggaaaagcctgatatgcatttttaagtagcatcctgatgattctccaggtgacgcacacatgggaatcaacgaagagggaacatcgtgagttaaagaactcaaaacaactgacgctaattccaactcaaaacttagctactgagaccgcttgacctaatctacattcctgtatcttggtttttaaagtttttataaaagcaacatcagccctgttaaataaaaaagtagacctcaactacataaatagagtacctggtacctaatatagatacaaattaaacctgctattagtaacttcctccaaatatgattgtgaacagtggagaataaagaagatacacactctggtgattacatgactcataccttagtgctggctgctgttactgttttccaacttgtacaggtagagaaagtctacctcctccccaaaataaacaaccacaccaaaaacaaagatggctcgagaacagagtaagcaatatgaatccagactcattcattacatatctcacccaagatttttggccttttaagcctcagtggaaatgatttacattttatttccatggcagctttccattctcaaaagaagaagcactttcagaactacactccacacccagaaggcaaatgatactttataatccattctttgtacgatttacagcagctcccttggaaaggaatttactggtcggtgtggtgtggctgttattatgtctgagtttaggaactgcttctaacttctcttcattaagtagttaaaaaatatttaatgagtctctattacgcgttaggtgctctgctaggaaatggaattatatgcagagaccacagtctctgatctgatgtggctcatgtactcagagaaatagcacatgtaaataaacaatagttatggcctcgcttgataggtgccatgacatagtggagagagatgttaaatgttatgggacccatgaagaggcgtctttgtctgcttgacaaagtcaggaacgctttcagaggagagttaatatctgatctggatttaaaagaacgtctagaaatatgagcttaaagaaatacacggttttattaaaaacttcatacagttattcaaaattgagtaaggataaacccagttaaattcaagtctggatatacttgccttacatgagacatctaaattttatcaatagcaacaacagaaacaaaataaaaatgagaacggattccctctagggtgtttgcctgtggtaagcaagatgaggctgtcctgcagtgctggggtgaatgcttatgagccctgtagagcccagggtagtctggacgtgctctgcaactctctgttttataaatgagccaaagacggcctgtgtgcactgatgcccgggttgtttatttcttcattgcaggctgagagctttagctcataagcctgctggcaccaaactcaaattttacacatccaattattttaaaaatagcccaaactagcagacttgtagccatttagagcctgcctgctttgcataccctgcaaaacttcacctgacagctgttacccattgataagataagactttggagttgtaagatcctgttgaggactgagttctgtcttcccaaaactgctatgttgaaatctcaaccccaggtgcctcagaatgtgactgtaccgggggctgagttctttagagagtaattaagattaaaagaggtcatgcaggggccctaatccaatatgactggtgcctcctaataagagaagataagaacccagacacacacagagggaagaccacgtgaggacccagagagaaggggccttctgcaagccaaggaggggcctcaggagaaaccaaccccactgacaccgtgatcttggacttctcgattccaaaattaagaagaaacagatttctgttctttaaggcatccagtttgtggtactttatcatggcagcctgagactaacacagactccaagctgctggtgtccatggaaggcctctgccccagagacgcctcaccctccaggctgctgagagacaacggctggaccccgggcccttctatgatcccccttccttggggagttgatgtgccattctcccctgcttggtgtggcccccagccactgccgtaagcctctggaagagcttgtgttgtatggggtctcccttctcatgcaagcatcgcctgataaaacctgttgtgtgatcctgcctctctcaagttcttatcttttccatgatcagccccagattcctccaacccctacacactgcctggggtctttgcaaatcaatgtcttactaacaacaaggtccctttgcatttggatcaactcatgtaaagttcttgttgaccaacccaggaggtatttattaaatatttattttggttattttcagcatgatatagccaattttttttctttatactagctctagggtgaatacaaatataatataatatttttataagaatatgaatctcatgactcagaattattaatttcatgtgctattacttttcactatgaaagatgaaaacgctaagagcagtgttaacggactatatcagatatagtttaagatttggaagactaattatttagatctctgtttttctgtgttttactgtgaatgcagaaatttaaattatgttttcagcttttcctgtagaagactgcttaaatgaaataaaggaaaacatgattataagtacctactgtatgaactaattcatataagaaaacaagcagtttatgagacataatgatatcatattacaatcaaggcctatacataaacaatgaaataatcattcagagagtaattttagactaacgtagtgataaaagctgtatgtcgtgagggtcaggcaggccccgctgtgaatgtgattgcaccagttgctaatttgctgtcagtgcagtcataggttaaacagctaatctcccagaccactggcttcctcgcctataacacgcagataataaagaagagtctgtatttcacagagatgtgatcattcagttagacacatagataatgttcctggaacaataactgtggcatactaaatgcttaataactactgatttctaactccctttactgctttattctacagcagtttcattttacagagttaataccaaatatgtataatgtatttaacatgcacgagcctttaaacacctaagagccacgaagttattcaaactgaataaatgggtatgaatatatgttaataatcaaacactcaaaatactaatacttagttttaaataactcgtttatcaaaaagttcatctcaatgcttcaagtaatggctaccaaagccaaacttaaatgtaaataataaaaaatctactttaaacatgattgtcaaacatatattcaacagttgtcagatgcaaaagccacacgtattttgtagttgataagatttgcatttgagtagggtgtctagtaacagtctaagagtacatatgacatttccatgttttaatgaatttcaggtagctatgataaaattctaaacctgttctattcaatattgatactcattaaattgatacataagctgtttaagaaagataaatactgcacagctcacggaaaggtttattaagattttcaaatgtctaatatcatccaaaaatctagggggaacattctgaattacagtattatgtttttactggaaatataacttgccataagacaagaagacagagtatggcacgaatgatattcatgtgggctgactcaatgcctcatgttgtcataaatctggccttttcatttctccctcccacagacacaaaacagcagcatccgacgcccagcagcagcagcagagtgaggtaaaagcgcaaagcttccatcttcaggataaaagattcttctcataagacaatttgtgattccttaaaaatatgaggacttcataataaaaaactatattgaacactaattttttgactgtgtgagggaaacatataagacataaacgtgatatcctttactgagatgaaaacataccagtaatattttaatattctcagaaaactatcgcaaggacaaaaaaccaaacaccgcgtgctctcactcataggtgggaattgaacagtgagaacacatggacacaggaaggggaacatcacacaccggggactgctgtggggtggggggcggggggaggaatcgcattaggagatatacctaatgctaaatgacgagttaacggtgcagcacaccaacgtggcacatgtatacatatgtaactaacctgcacgttgtgcgcatgtaccctaaaacttaaattataataataataaaataaaatttaaaaaaagaggaaaaatagaataattaaaataaaatctaagtaaattataggagattattcggcatggtctaaatacagagccaatactcttcaaaggttttcaagtaaacattccccataaaatcgtgtcatgagttaaagaatttatcagcctaatagacacattctcccttttttaattgcaaagagactccccactttctcttttgctgcactacagtataatttctttttacccaaacactccttatggctagttttttcacatcttttagaacaagagtccattcccaccaatttaatctcattccttatcacaacatactgtttgcgacgctaatagtattttacattttgcattaatgtgttaaattatttacctcttgcagtcaggattccctaataaattactagatctttgaagaacaggaatgagtttgttgccttctcaatgcatactcaatgctggcctggcaaattatatggaatctataaaatatcttttaaatggaagagtacctaaatgcatggatgaatgaacttatggttcaatgataaaaatgataaaaaagaaaagaatcaaaatgaaaaagtaaacataaaaataaatacatattcaaaattaatatatgtataaaaatttttaaagtagttaatcaaatttgctaggggaagctgggcatggtggctcacgcctgtaaccccagcactttgggaggccaagcagggtggatcatctgaggtcaggagttcaagactagcctggacaacatggtgaaaccccgtctctactaaaaacaccaaaattagcccgacatggttgcaggtacctataatcccagctactcctccagaagctgaggcaggaggatcacttgaacccaggaggcagaggttacagtgagctgcgattgtactactgcactccagcctaggcagcagagtcagacttcatctcaaaaaaaaaaaaaaaaaaaaaaaaaaaaaaaaaaaaaaaattcttgccttttggagccagggatagctctatgaaagaggatatggctgagctagatcttataggatgacgaaattcactagatttggttcatgaggaagtgaattccaaacagtaatgtattctcttacattatgtagtgtgtgtgtgtgtgcgtgtgtgtgtgtgtgtgtgtggtgtgtatacatttttcattcaaccaaaggttatcagagaaattatgaagggatatttagaaataaattagaataaattctatgcttgtttaacactcaactttctctttagataattttacagtattgcatttagtcatgatgttctggtttttatttatacattcatctgaaagagcaaagtggtagagctaaaatcagtaagcttggctctgtttccaaactcataaaaatgcaatatcgtggcagaaagattcttgtcctatttcttattttacctgggcttttgggatttcacatggacatagttgcaaaataatactccccaaacttcagtttcacatgactaatgtagaacatttgctgtagataatagtcaatgaatttggtattacacttcacagcctagagaagacgacttttcttcatataatgttggctagctggtagcaaaatcatgtctttcatagatctccatttgtagtggataggaaatttggatcttaataagacatgggaagatgaaatgggtcacacagtactaaagcagagaaagacatcccgataggtgtcttagaagccagaaaacctccccatttttaaacagataatcagagtggttatgtcctgggggcgaacgcagagccaaactcaggagttcttggtttagataagttatttccccctactagcaatgatacgccatgaacagacttgttctgaaagtcttgtttgtatgtgaaagtcagaatcctgaacttttgttccaattatttaactctaattgaattaaatttaatttatgaattttaaatatagattattgcaatgaaaatttgaaattatattggagtgccctgtaagtataacgtatataccaggtttctaagacttcttttaatagactctattataacttattgctgatgacatgttgaaatattttggacacatgggttaacattattaaaattagtcatatcagttatgaatttttaaatctgctgctcatttggaattacattcatggctcattatattgctgttgcccactgctgtttcaaccatcgcatataaaattacttacagtcagaaaatttatgaaagatattaaagagttcctcttctaaaatgattttgcaattttccctacaactgtttcttcaaagttcatcaattttcaaaatgaacagtgacttacaaaaagaactaaataaatatatacattaaaaattgttttctatataaaaatactaaaatgtaacaaaaaagaaccagaatgatagtcatagtgtcatggggtcaagacatagctgtgaaggaagaatgaattttccttccagataaatgagtaaagataggaaatgggaagatgagctgggaagccttaagaacctttaagcagggctaaaatagaaaaagaaaaaacaaaacaaaacatcgataatagcctgtattatttgtatttttaaagaatcatatacctgctgcattttatgttgttcttgaagaatatgcatttatataagaaaattctacttcgaagatttaatgaatgaatgtttccttcttgtctactatagcagtgatacatgatatgatagagtaatgctttttatttcattgatggatacaaaaataaagagacaaaaataacagaattgcaaggtaactttatggtagaaaaaggtggccctcaggtcctattgcgaagaaaagttgcctattttattgccctcctctggtataagccaaacatttcaatagacatagctcataagaacagaaggcatagattagagaaagctcttcactggatacttaagtgtgaaaggaaaaccaagcacctgggtggcctactgtatggttactcaagctccatgtaggagaaaactcagcgctttagctcctgggaaaactgtcaggtcaaattgcacgccatggcaggcacaccatgagaagatgtgtacattttaagggatcattatgaaagttcccagatagcctgcctttttgtatcctagtttttattaaattttgaaaatcaagtgaactgtgaaaaacctctggagtcattgatacggtttggctgtgtccccacccaaatctcatctagaattgtagctcccatgattcccatgtgttgtgggaggagcctggggggaggtgattgaactatggaggcaagtctttcctgggctgttctcgtgatagtgaatgagtctcgtgagagctgatgatttataaaaatgggaggttctctgcacaaattctctctctttgcctgctgccatccacataagacgtgacttgctcctccttgccttctgccataattgtgaggcctccccagccatgtggaactgtgagtctaatcaagcctcttgcttttgttaattgccaagtctccggtatgcctttatcagcagcgttaaaacggtataatatagttatgtatcagaaagttcattacaaatctcacccacaatcagatgagcaaggaaattacagaacaaaatggcaagacacaaaatggattaattaagaatatctgaggtatctttttaaatgaagaactctcaaagctcacataactgataattctgttgcaataattttcaaaacctgtcttttgataagagacagaatttagcaagtggaaccagaccctttctgactataggttcggattttcttctctgtccgcagcccgtcttgctgtgtgatctgttatcatctcactttaccaaagcaggccaacccctaccctatccacacgtgcctgggagttggactccatccttcatgaaggagtcctggtagcagtgatgtggcaaggactgcagaaataagaacagtaagaatagcacacactaatagatccttttcagggaaccatgccctggctacgtgttctccaggagcttacttccataatcctaaggatcctacaaataaggacattgctgttatccttgctctactagggaagaacctggaaatggaaaagttaagaacatgttcaaagtcccccaagtactaaggagtagggcttgtgttaatgacaaaatgagcaggttttcataagctctgcagagctgcaaaattcacagatatagaaactccaaccttttggtgggtggtagtgggccaaaataattctcattatacatcctttggtgctaatttttgctaatggtaatgatctcgtctatttagtaattcaaaataggtccttaatacttgacatgttcacagtcttctgtgggagcaagggatataaaaacaaacatagattgaccctcaaatcatttgccatacctggtttttacgttatctcttttgcagttctgaaactgtatacataatagactcagcctgggctgctgcttcatcaaagtgactttttgttgtagctgttgtttttttcattccagatgaattttcctacttttgtattaagtacactggttcagaaggtgtaaaactcataataaagtaaatattgaaacacatatgttatgataagaggagtgtaggatggctgttgctagttttccttctctctcacacacacacactcacacacatgcagacagaatatgcaattgtggttgcctcaaataacagaatattagtgtggtagaagaaataatgcaagtcagaaaaccaaggttccagtccggggcctgaaggcaactctaatccaggtctactaaaggtctgcttatgaaatgatctgctgacacctcctgttcacacctcatggagttcttgtaggaaataaataaaataatgcatattaaaataacataattgtatgcagagcaatgtatacaaataccacattaccattaaaccatgtcaaccatactgtttcttaactgtgccatcttgacctccaactcctttctccttctttggtctttacaaagccaatcatgatgctatttctaatcagctctgctcctcaatgctctgtgaaagtccaggtgtttccccagccagcagttcctacgctctcctcaaatgggtccctatgttaggttttggatctccaacattaaatgtagtttctgatgtggtaaatcctccctgtgttttttagaatgaacgaacaactagactctggaatagtcccaagaaaaaactccccaggcattgaattaaaaaggaaatccagacctatgcatcatatttgtatgtataaagaaagcagtgggggaagctagggggaaattaaaatatatttatatattaaacattgaagtgtataaagaatgaagacaacactcaaaaaaaaaaaatgaaatacccatctagtggacaaatatgtgttaacaacctgctagtaaaaaggtactattctactgttaaaagcaagaaaaacgcaatagaaagaagatgtattcctctgttttcaaacaatagcagaaaatatacactagtattcaagagttgatttctgcacagatagtaggtgatgcttgtggctgaaacaggacagctgagtgaggccacgttggtgaagcccacgggatatgtgatgggaaaacatgacagcagggtatgaaccctgcattttcatgaccatttttcatcacacttggtcttttttttttttttttttggtttggtttgggtttttcagtgccacctagtgaagtatttattacatatagtgagtcatgttgatgaaataaatgtctttatctccttagacaataaatacgcccagagtttttaaaaccaaatctgatatttgatcctaaaattctttcaaacaaattatcatacatgattctatcgacaaagtatttagaaattatccagtaaattacggtgagtcaaaattgtgcatttttttattttcaacaatttatataataaaaattggaattcattcttttaattttaccatgacttctaagtattcttaaaaagtaaaactttaacagcattgccacattcaaagccacactatcagaaaactgatggcatcacagaacaacttgccacgtattttttttactaggtttgtgcaaaataattgcagtttatattttgaatcaagacattcaatattttctgttaacgatgtcaattaaactgcaagtcaaatacatcaacctttctgaaagatgatccagatcatagtgctaaattttcaatctactccaacattattatttgggaaaagttgaccaggctcccaccttccctctatgccacaacccccacctaccaacaaaaaaggaagaagtggtcctttagagaaaagcatcattcactcgaacagagaggaaaggaaagacaacactctgtagtatggtctgtaggtagctatgtggccaaggctcccggcatggggatttctcagcagacagtgagtgagaaacctccaatcttaacactccccttccactcacagctgaaccaccaactgtcattcccaacaatgggaatgctctactttaaccatgagctgtaacatattacaaattatgcagataacacattgatttgtcgtaagagcaatttagcgccattcctctagtaaaacagtatttactcttccttgtagcaacccctaaaggaaatgattgcacataagaaattgtaattatctggtttatacatgaagtatgaatttggtgcaaaagtaatagcggtttttgtcattacttttaaatgccacaaccacaattacttttgcaccaacctaaaaaataatagaagtctcccaagctagggatggtcaggtgtcacctcgtcatcacatgggcaatgcttatttcacaaggacaatcaatagccagcattccacacagggacatgtcaattactatctagaagcagcaggcttcccaggaggccctcttgacatgtgtccacagttccatcgtgattcttccagtcccacatgcatttattgaatgataagtgcaggccttagtaaccacctgagaccaggggcagaatatccatgatagatctgggtcctgaacgctgcctttgcccgttgcttccagaaaacagtggggagctctgtttcagctctagaaggagtggagcgggtgatgaattatctttactctaggctattcattttccctgggacacattttttaaatagagatttggaaaatgagacaaactaaaaataagaacataaaaagggagaaagtgttgttaagagagaaccaacatttgtgatttttgagtagaaactttgtagttcacagtattatttcatgcgctacatttgattataatactagacaagagattcccattataaagcaaacatcctttgcaattaccaagctctacataataggaaatgtattaatgtcagaaatacttttgcaaaatactatggtattaggttcacgctgaccatgaagatcgtggtctcctccttcaacaagaattgcatcttacttatgtatgcccaagggcaaatgcctagtactaaaaaactataaaataattgctagatgattttttacatcaggtaattattgtgcaagcaagaatacacactcatgaaaaagacagtggaaaccaactgaattatagaactgtgttgtggtctattacgaaggtagctgacacacacattggtaaacactgatcatgtctctttcaccaacttgacatcactcttgggaattaacaaaaattgtgtaatttttgcaaaatatcctagaagtattagaaaaccagaaacgtagggttattataattatcattgcttaaatttgctttcatatttgataaataacaggttacgttagcagggactatgattctccacaacctgaattttctttcaagatactctaaccctggagaataaatttaatcgacaaatgttttttttctccccccaagaagacataggatatttagccatgattccagaagactattgtgaatgatcaaacatgacttcgtcaaggttagacaatcctggttttcagggaatggcttctaacccaactgtagataccatctatccacatcctcttacttacaaagtctttatagagctattgagctgtataatatttcatatttttctttccctttctttgtgtgtctggatccaagacataatttttttcagaagcttcggaggattctaacttgcttttacttaagatatttttcaagaaagttaagttacccaatgacataagtgcacatataattcttcctagatgcttcccaaatcagatttagttgttttggccagttgggttgctgtaattacatcaaacattagcattaggagtcttttttgtagcatttatatgatcaggaatgagctgtgtagctggtatattgttatataagtcttcctctgccctttacccaaaaaacaataaaatctcaccagaaagtaaaatttgtttttatacggtcattttataccttttttctgaacttattttaggccatgcaattgcctttacctatccttctggcagatcctgtttgcaaagttggtgagttgtcagtgtcaagatataaagaatgagtatcacttttccaaaacgcaggttatccgtaccagcaggtgtttgtagagataagtgttcttttgtacaaagatgcatcttgtgcttaagaagttggtagggccccatattgcagccatagatcccagaactatagataaaatttgaatactgaaagtacatagcagagagtggaactttatacagtacatttctttctattaataggtacactgataatgaaatgcatcatatacatgactttagacacactacaatcgtagctattcattctttttactgatgaatcctggaaagtctaatgcagaagttagaaagattaagttttcagcctgtgtctttaaatggaatgacgtcttagttctatgaaatcagacttaacaggggaagataaggcaacctacagggcgtgcctgcttcctgagggtgtgctgactggcccagggcactctggattgtattcagtctctatagaatccatggctctcactcagagccctgggtgtgggatcatgtcagtgctttggaaaacatgcatcaaagcctagagcctttcccaccacattcagcagcatatgcttcagatgggtttgcattttgtgttctggttctgactttcatccttttaaggactatttctaaatacttctcaatgtccttgtttttgacctgtattccttggttcatggctgctgtttccaactttctgttccatcttcagtgataagacaatatctagacaggagtagccccacaagtccaattaatccctacctctctagagagccatccatgaacagcaacaacaaaagttattttataggaataaagaaggtgggatccaggaagtcacagaaagacattccaagactctcaatcatgccagaaggtaagtggaatatgcaaaacacatgtggacttttaccatatctaccacagatatgaaaatactccataaaatgagaatcatgtaagacttagaggtcagctgtgtagcatggcgcctagagttaacaatactttgctgtgtacttacatttgctaaaagggtagatcttatgttaattatttgtatcacaaaataacaataaacataaagcaaaaggaaattttagtgttgatgtataggtttatggcatagattgcagcaatggtttcatggtgtacaccccacaaactctccaatgtatatattaattatgtacagctttttgtaggtcaaaaaaatgtttaagtaagatgagaatgctgctgaattttcacataagagctcactttctctctctctctctctctctctcatacacacacacacaccatgaaaacttctgtcttttaagaagtgtcctaagaaaaggtatagtactaaaaatgtcttaagctttccatgtttgagacgggattagcttgagttcaaggagtcatctaaaataccccagggaacatactgtatttttgttaggtctttgtgagatttattaacaaaaggtgacgtttgtaaaatcattttctttgtgatgatatatgtgagacggtgtttttttaaaaaatgatgatctgaaaagttgatcagaggataaagaactctctctcatgagtaacaaatcagaagccaccaaacagtgattctcaaagtatgttccagggaccctttgggggatccctgaggtactctcagaagccatgaggtcaaaactcttatcaggacaatattgagaagtcacttgtccctttcttattctgttcggagtggacaatgtggttttccaaaaggtacatagtgcacaacattacaacagattgtatgcaaaaaaaattacaagaatccagctgtctgctgttaaagcaggcattaatatgtttgctcaaatgtaaatcaataccacttctctggctaaattgttttcttctgaaaaaaattactttccttaaaaatatgttatttcttataaatatgcaactcataaaatttaatgatttataactattatttaattatgaataaatttctaaaaatgcctctgtcttcattattgacagggtaaatataagtagataaaacttacataagcaaaagctccttgggggcagtgttgccagatttaacaaagacaaaagacaaccacaaaattgcaacaggatgttaaattccatattaacagcaaattagtttttagtgtaagtataattcatagaatatgtggcaatcctactatggggttcttacaaatttttcagactataaagcggtcctgacagcaaaagtttcagaactgctgccgtagaaaatctttaggtacaaatttttcatttaaatcaaaattcgtgcataggttaccgtcaggttgctgcccatgctgctgccattgttttttttttttaaatttatttaatttttttatttttatttatttttgtttgtctgtttgagaccgagtctcgatttgtcacccaggctggagtgcagtggcgagatcccggctcactgcaagccccgccttccgggttcatgccattttcctgcctcagcctccagagtagctgggactacaggtgcccgccaccacgcccgactagttttttgtattttagtagatacggggtttcaccgtgttagccaggatggtctcgatctcctgaccttgtgatctgcccacctcagcctcccaaagtgctaggattacaggcacgagccaccgcgccaggcctgccattgttatttgtgactgcataccatgctccattttgtgtcttcatcatccggatttaaataagcaaatattgttcacagtttatcgtacaggtagtgcttttttttttttttttttttttttttttttactttcagtgctgggatacacttgctgaacgtgcaggtttgttacataggaatacatttgccatggtggtttgctgcatctaccaacccatcatctaggttttaatccccacatgcattaggtatttgtcctaacactatccctcccctttcccccgaccccctgacaggccccagtgtgtgatgttcccctccccgtgcccatatgttctcattgttcagctcccacttatgagtgaggaacatgcggtacttgattttctgttcctgtattagttttctgaggatgatggtttctagcttcatccatgtccctgcaaagggcatgaactcattcttttttagggctgcatagtgttccatggtgtatatgtgccacattttctttatctagtatatcactgatgggcatttgggttgcttccaagtctttgctattgacccagcaatcccatagccaaaggattataaatcattctactataggcagcgctttcttttccttatttccttttcacaaagaagtaaagtcagcctcattcatcccattataccggaactacagctgagcttcgttaagtaatgcatgcacacaaaaagacagacctagtatctgagccataccctccggcaccaagatgtgaggcaaatcacatgaactgccaccccatcctctctgccgctctctgttggattacgttgattgtatgatactctatcattttttgttactataaaactgattaacctggctgaatcatcgcgagtagaatacagatatgtaacttaactgtgtgagtaggacattttttgtaggatctgtcaccaaatgtatatatcgccatgtaatcagtgacgtacagttgttttgccatttttagccacactgatagatgatctccttacaggccatatgacaatccattaattaaaacaacaaaaataactaaacccgatgtgccgtggaatgtattcaggtcatttaatcataagcttcaagaacagagtctataatttgtatcttgggtattggaaaaagtcttgaagtcagatgatttgggttttaatctcaactctattgattgctttcggtgagtaatttggttactgacaatatctatgtggctttgtttttgtcatccctataataagtataacgtcacctgccctacacacccccagaaggttggaaggaaggtgtaactacatgttaaagtgttttgccagatgtaaagtcctgtataagtgtaagatgcgagctttctgcgctcgtcaggccctcatggtgcaccatggccccacgctagctctgtgtgcttatctagtttgtcagaatcagcacttcttttaaacatttttgtaataacagctttgagatacaattcccataccatgaaattcactctctaaaagtatacaatctggtgctttttagtatatgtgcagagttttacagccaccatcataatcccttttcagaaacttttatcactttgaaaagaaatcctgcaccgcattcagtcactccggaagagaaatcctgcacccccattcacagtcactccggaaaagaaatcctgcaagcccattcacactcactccagaaaagaaatcctgcacctccattcagtcactccgaaagagaaatcctgcacccccattcagtcactccggaagagaaatcctgcacccccattcagtcactccggaaaataaatcccgcaccctcattcacagtcactctggaagagaaatcctgcaccgccattcacagtcactccggaagagaaatcctgcaagcccattcacagtcctccagaaaagaaatcctgcacctccattcagtcactccggaagagaaatcctgcacccccattcacagtcactccggaagagaaatcctgcacccccattcacagtcactccagaaaagaaatcctgcaagcccattcacagtcactccagaaaagaaatcctgcacctccattcagtcactctgaaagagaaatcctgcacccgcattcagtcactccagaagagaaatcctgcacccccattcagtcactccggaaaataaatcctgcaccttcattcacagtcactctggaagagaaatcctgcacccccattcacagtcactccggaagagaaatcccgcacccccattcagtcactccggaagagaaatcctgcaccgccattcagagtcactctggaagagaaatcctgcacccccattcagtcactctggaagagaaatcctgcaccgccattcagagtcactctggaagagaaatcctgcacccccattcagtcactccggaagagaaatcctgcacccccattcaatcactttgaaaagaaatcctgcacccccattcagtcactccagaaaagaaatcctgcacccccattcagtcactccggaagagaaatcgtgcacccccaatcagtcactccggaagagaaatcctgcacccgcattcagtcactccggaaaagaaatgttgcacccccattcagtcactccggaagagaaatcctgcacccccattcagagtcactccggaagagaaatcttgcacctgcattcacagtcactccggaagagaaatcctgcaccgtcattcacagtcactctggaaaagaaatcctgcacccctactcacagtcactccggagtttctcctccctagatcccaggcaaccactcacctactttctgcgtcaaaagattttttggttctagatacatcatataaatggccatccaacatatggcattttgtgactgggcttctttcacccagctaatgttttcagggtgtacccacgtggtagcatttgtcatcgtagtactacattttaaacatgtaaagagctcagtggtgctccaagaagcaagactttggtagagacggccgcttgctcccaaatatcatgctgaggaagccaagttgtcatgacacaaagccaaggattatcagtagtttagagttaattcatttggaaaggcttctgtatttgatcccagagctgtgagatccatatgaccaggatggacggacaaaaaaggggacttttgctgttaatctacgtgagccctgatgggcagaggcctagatcctcctattatgctcttggagtttatcaacccactcttgaagaacatagtacagaccttttgggaacacaatattcttgggaatttttttttcagtttacctaaattattaaccaatccgagaagaggatgttaaacaagaaaataacccactaatgatgaagatctggcagaccccaaaacgatgtcattgcaaactgaagatttttaaaaacatcatcaaaaagtttacaaatgactcacagagagaaaaacctaaaaatacaatggaattagcaatagtattacagtgggagtattttaataaaagtacactgtaatttttctgtgcttctatattttatatttatataaagttttatgcctataaagtgacaaatctgcccttttggagtgtatgtatgtgtataaataaatatatgtaattcaatagctagaatataatatacatacacatatattaatatataatatacatatttatatatataaatataaaatacactacaagagggcagatttgtcagtctataggtataacatttgtggataaacagaacagtcttccaatttatagatattgtaattcaggcatatgtaaggacacaattatctcaacagattatgtacacatgtacacaatcttaagctatcttaatggcatttgtcagaacttttgagctgatatcatcagaaaagagaaagcattcgctagggagcacaatttaatagagcacacctgctatctcagaaagaaataccttctgcgtgggcctggccccaaggatgctgaaggacgcccaaggatgctcaaggaggccagcccgactcatatggctttccttttcttccctactctctggcttactttgaagcaatttttgctataaacctctgcctttgcatggatggtttatcaattgaaacttgttttcactcattcacctttactctcttgccagagtatttacaactcattaatatttttgttattgttttaaatgttgccttttatttcagatacagcggggtacaggtgtaggattgttacatgggtatattggatccaggtggtaagcatagtacccaataggtagtttttcaacccctcccctcctccctctttccccattctagtagcctgaaatgtctaattttcccatttttatggccatgtgtgctcagtgtttagttcccagttataagtgagaacatgtggtatttggtattcggtccctgtgttagcttgcttaggattatgacctccaactccatccacgtacaatttctttctttctttctttcctttttttgaggtggagtcttgctccgttgcccaggctggagtgcagtagtgtgatctcagctcgatgcaagctccgcctcccgggttcatgtcactctcctgcctcagcctcccaagtagctgggactacaggtgcctgccaccacgcccggcttatttctgtatttttaatagagacggggtttccccatgttagccaggatggtctcgatttcctgacctcgtgatctgcctgcctcagcctcccaaagtgctgggattacaggcgtgagccaccacgcctggccaatttatttctttatgtgttttctctcttataggactagggtagaagatacaatattaaaaacataatctcccatatataacaactttgaaaattatataatgcagtataatctatataaggtatataaagaactgcttgaaatatcaataacatagtcaataactacattttaacaatttttaaataatttaaatgaatttaattttaaccaaaatcacagggggaagtcaattatttgttatctgaaaaataatatgtagttatagagaaagtatcttattttagtttatttattgctatttttagaataacaagttacttttgtagcgtcttccaaggatgaacaatagaattcatttgcttatctgcttgtagatttgctttgcaatcattataaacttaaagattttgatgaagtatatgtgtttcaatccattgccattatcattctttcgatgttcaaattttttatcttgtaacagtaagagctctccaagttactcgtaggttaaccctaagtcatccaagatagcatctctgttctgtgaaattataatatagttccaaatcattctgttcatgatttgccaaagaccttgattcagccattttctgaggagccctgatctctttatttacaataaggtatttggagacaataatctaaatgatcgcagtagtactcattgttaataggttagttcatgcttctaggacttttcagtggagctataaaaatattttccctttctttaaaggaaatacatcgtgagttcacactcctgcttccaattcaaacttagggttactgagcttttacttctttacttttataattaactctttgttgttgatgtttataataagaattgagaaacttagatcttaacaatgttgatgtaattatttgttttatcttaaaataaataaaagtttcagaatatcaatgccaccattattaacattatttttgaaaacagctgaaaatttcctcagtgttttcatagggcgtgccccactaagtcagtaaatctgattaccatgttcaagattcacttgacaaggttcctttctgtatatataaaccgcaactcagtaagtaaggagatttgttttatttgactgcaaatttttaacgatgcttttgcatttcattttaacctattcataattatgtgaaaccatatacacatattttaaataaaatctacaaacatgttctattaaaaaaaatctagttttctccctgttttcagcacacacaacttcccatttcctgtgtgtaatatttatttgcttgtattttttaaatttatccttacaattttaaatttaatcatatatatacatataggtatggatactctcagccatttgtatacgtgaagtttcagcctaggtgcatccttcttgtactttctctaccttgtctttttctcttaacaaatctcacatgtcatgatattgtatacagagatattgcattctccttcttacagcagcatcggacactgttgtggatatcctgccgtttagtggctgcacaagtggatactgagaataggtacaggttatttatttattcctttatttgtactttgttatttatttatacttttatttgtactaatgccagaataaaaagttttgagtatatgccacttttactttcaacagcatatatttttgaatagattcctggaacttatctgctgtgtcagatcatagcacctgtatcattttattaacatgcggccaaatttcctttcacaaggggtgtcaccttttgcattttgcacaatagtgcatcagagtgccagtttctccagactctcagggagaaattgtaaaactgtgtaaaaatgtaaaatgttacttattggaaaaatgagaaatggcatatcatgattatcattttcatttctcttaacatatcatacaaatttgagcacggtcttatattaaacatcaatagtgggttatttaaacctgcttagacaatcaaagacagaaaattctatcaaaatagggaaatgtgaactattttcaaatatgcatttatatgtaaaactgtattacaatttgggtcctcttgtacttttctgtcatgagactactatttatatatcagcattaaagggaaatataatttaaaatatttgatttagaggaaactgacaaaatacagtaggtatttttagaaataaattatccatctggtaaaatgcttatctttttataaatgctgttaaagatgcgacttaataaatgctaaaatgagagattattatataaagaaagttgtgctaattctgtagggcaatgtaatattgcatatagcttttctgttttgtgattattcctattattgttattgttattaaaagtcatattactaattgctataaggctaatagtcatatattccagaatttggaactgtatgttattacagactagttttaattgactctgattaaaaagattagttttcaagttgaaaacttgctgaacatttcgtggcctgggcttttctcggacctactgttatctgacactattctataaacatttcaaattaagcattgatttgcattactttcattcttcctcgaagactccatcagggtgtgctcagacaaaagcatggcttcccccagcgaagccacgggaatacgcagtggaagacctacctggcctcgaatcaccaggcatgcagccgttgctgactctcagggccgtgtttatccaacagagctgcgtaagatccagcagaagcagcactttttgcattgctttgatcacataggatttagaatgcttattttctcattagttattctctctttgtgagaaaagcattaacttcattaactggctctgacaaaccaatttgcttttaacagctgtactcaaaaccagacaccatgctctgcgtcatggttttcatctgaatcacataactgagtataaatatagctgtcaattgcttcatctctccaataattctggagacattttcttgctaggtatcaataaaacctcaaataaaatagaccagagcctgtgatgtcatttggcacaggtataccatgactccggtgtaacatgcaactggaggtggctacattttttttttttttgcctgctatttactgccttgatgtatgtggcacccttatatttttctaatccctcttctgcatttattttgttatcctaccactacgacattgcaaatattataacttctccagagttcatattttctcttcaggtctaacttttttttttaaaaggctgggtgcgatggcttatgcctgtaatccaagcactttgggaggccgaggcagggagatcacctgagatcaggagtttgagaccagcctggtcgacatggtgaaaccctgtctctactaaaaatagaaaaattagctgtgtgtggtggcaggtgcctgtaatcccacctacttgggaggctgaggcaggagaatcgcttgaacccaggagttggacgttgcagtgagccgagatcgcaccactgtactccagtatggaccacaaaggaagactccatctcaaaaaaaaatgaaatgaaatgaaatataataaaataaaatgtagtaccaacctggataagacacttgtcatacatcctagcaagtaaacctccaaattatttgatgaagggatttgatgaagttagtgtttacccattttacagataaggaaacagaagctcaaagaagtaacttgttttgggtcacaaagctggtgagaaggtaaaactgatttctcaaatgtacagttcttgcttaccaaagttccccttttatggaatctttgaatctaaaagcccatattgaatgcagaaagctttattttttcagcaaaatgctaattctggcttcagttctaatctcagccaaaataaataaaataacctactcccttgtcaggcaacgttatcctccattgccagtgttaggtgccagaaaaatgtgtggcttttgtttttctttttagaaatgttacataatgacctttagcttagcatattctgtggaaaaagctaaaaatggatttttttgtgggtgaattaacacacaatttgaattattttgcagtattactgtatttgaggtttgccactgccacaagtcagcagacactaaatattgcattcagctttcatatgcagtatttctggaagatagtatgcatatgtgggatgtaaaatatatcttttaagacattttcagtctaaatagacttcccaatctctttcactaagcccatggatcagcaggaatgtttttggagtgttcccacagaatcatcatttcatttatgatggcattacatttttagtcagtcttcaaaaactcatctttgaaattgtgtgaaaaaaatataagcaaatatctttcccccaaaatcctctaatatttcattagccttacagaatgagttaacatatttagcaaacttccaacatttttctcatgttacactggcttataatgttaaaagggacttaggaaaaaagagtttgatgtaccacaggtggactgcaaatttaaatggtaaaataactgagaatattgtttattaagattatagtaggggaaaatatcctagctctatccttgaattattgtgattttacggaaacaaaatgttttatctttagtcacttagaatacaatactttctgatagttttaatctggtttattttccatatgggttaagcattatgtgtatgaaatagttttcccaaactcttttctgggtcaccttctgcctcaagacaggaaccccagagaggttgggtgtgcggaaatctcagggctggatttctcttcccatctaccccagcccaaactccgccccgtccaggtgctgcctgcagatgcccatggctattgagccgctcaccggggccctcttcccctcctcactcgccaagcagcaagctgaacctcccccggcttctttctgtcatattattttcaatacgattatcgtgacaccatatataagccctatgaatatataaacaccgaaagtggttggcgtgcaatgtaaagcatgatggactcaagttaggaatgaagtttgacaggaggggctgggatttgctttaaactgctgctggtttgctcagataatgtggtagattccagcaagaagtaaaataaggaaagatttctgcccataaacatctcaccaaaatttcagaaatcaccactaaaaaacttttccatgcaaccaaacaccacctgttcccccaaaactggtgaaataagcatgaaaattaaaaaataacaacaaccgcgaaaatctcaaaacctcaggccgggtgcagtggctcatgcctgtaattccaggacttaggggaggctgaggcaggagaatggcttgagcccaggagttccagaccagcctgggcaacagagcgagacctcatctgaaaacctaatggatgggaaagaaatgaaaacagattattttaattaaagataataagcactataacagaagtgaaaataaaccttgagaggggccagacatgggagcacctaacagtgtacaaaggtcaggaaaggcttcttggaataatcctgagttcactgtaactgcggatgcttaccaagtgtctaagctgtgccaggtactaagggctgtccacttaccttaatcatcccggaccagtgaggtaccttctgttattatccccattttacagatgataaaactgaggcaaaaaaaggtaaaggctcacccaaaccagcaacacaggaagtctgactctccgccactctgctagtctgctatttaattttatgaggctgtagactaaactgaacagctatgattcttgcatacaatagggttaatagcacaggtaaagggtctgaaacatgaaaagctcaaactctttaaatgcctcattttacttagcaaaatgtttcacaaactcgattgttagaaactctaaggacatttttgtgtttccccaaaatgctattgtctggagagttgagaattatgagaactgatttttttaccaccaatttaagccaatagtggtgccagggctcaatttcatgaatttccagctgcatctagggactggaagtcccatctctgctttgccagtaactactgtgtgacttagagtgagccagttcgtctctctcatccccaggatctactggcacgtgctgatcataactacccccatgcagttcttacagcaattacagtgggtactgcctttgaagattttaatgtgttaaagtgtttttatagttttgcttattttgtaagcactgccttcacctttgcacttctaagtgggctccacttggatcaaggtgtcccacgttatcaaaaatcggtaggcgtcgtggctcacacctgtaatccccacactttgggaggctgaactgggcctattgcttgaggtcaggagttcaagaacagcctggccaccatggtaaaaccctgtctgtactaaaaatgcaaaaattagccgggcatggtggcaagcacctgtaatcccaactactcaggaggctgacttgaaccaaggaggctgaggttgcagtaagccaagatcttaccactgcattccagcctgggtgacagagtgagaccctgtctaaataaataaataaataagataaagaaaaaaagaatcactcttatatcaccatgcttgaccaaaaataataataataagtggaattctcaataaatcctgacaaaactgtacagtcagcaatatgaaatgccagggaagggatggaggctggaggcgccgcacctgtagctgcactctgtccatttctataggatgaatgttggcaggcgatgaatttccagatgaggcctgactgacctcagatgtggaggaagaaatgctgtgagccacactctgttgccaattgaagcaaatgtggtcccagagcctgaagtccccgtgtgcaatgggcgccctctagcttcttaccaagtgaaatatatgctcatttctggacaatgaactcaacagtttgggcaagtaaacactatactgaatccacattcttagaactcttagttctaagtcttcctcaaactttctgaataaaaatatggcacaacttgtttcatggaagaaagaatcaagttaaaataccttttttttgaaatattaggataaacacagtcaacaaaacccatgaatatgttaatataaattgtcgttctccataacagaaaataaaagatacaaacttactaacaaaaaaaaagttttaatttttaagttttctcttcagaagaataaccattaaaaatctcactagacactgacgttttatagaacacagttctgagaacaatgggatatttgaatagatcaccaaatcaattttttaaaaaagcacaattattgaagcctcctttatgaatgctgttgcaaattagaagataaaagggtgctgtcatttttgcccagtattttatgttattgctaacgcaatttttttcaatgtaacttcttcactttgctccaatgcaagagaatggagattaacagactatatcaccactgtatcttatgcggcagaagatagtttgaatctatttaaattagggaacatataattcaatggatggtcatgaaaaaaataagtgaaagtacaaagtaaacatatggtagccatacatattttaaaatattcaagaaatataacatgattatattattaaatatttgtaaataaagaaaaaagtttttttcacagtatatttctatcactctaatagaaatatattagcatttttgaatatttatctaatgtttcttcagggcacctgcctccatacagttataatcatggcatatttgcaatttataaccagtgttttacaaattgatagtctatattttagagtaggtttaaggtgatggtaaaatgtagcagaaataagatttcatatatacccctcacatgcctcccatagttttccctattatcaacatcctgcattagtgtggcacatttattacaattgatgaatactgatacattattgattcaagtccattattgacattctatttctttgtgttatacagctgtgtaagttttgccaaatgtacaaagtcatgcatccaccattacagaatcacatctgacggtgtggactgccctaaagatccccaaagcttcacctgttcatccctcccttcctccaccccctggcaaccacccatccttttagcgtccccatagttctgccttttccagaatgtcatatatctggaattatacagtttgtagccttttcagattggcttattttacttagcattgtgcagttaagtttcctccatgcccttgcatgaattaattgtttccctttagccctgaataattttgattatctgtatggaccacagtttatacattcaccaaccgaaacacatattggatgcttccagttttgactataaacgttcatgcacaggtttttgtatgaacataagtttcaattcatttcagtagatacctatgatggctggatcatatgggaaggacacgtttaattttgaaaaaaaaaaaaaaaaaaaaaaaaaaaaacccacaccaaagtgtcttccaaacgggctgtaccattttgcattcccaccgctaatgactgagagttccagtggattcatattctcaccagcatttgatgtcaacattttgaattttaaccattctactaggaatgtggtggtatctgattattgtttcaatttgcaattccttagggacataagatgtggagcgccttttcatatgataatttgacatctgtttatcatctttggtgaggtgtctgttaaggtctttagcccatttattaggttcattgttttctattgagttttacatttaattatatattttcggacacaggccctttatcagaaatccgtttttgcaattacttttcccagtctgtggcttgccttttattcttttaacattgtctttcttagggttcttaatttgcataaagtccaacttaaatgattttttcatggatcacacctttgatgttgtatgtaaaaaccattgccaaacctaaagccatctgagtttcctcctttgtcatccttgtgtggttatatagtctcgcatttcatatttaggtctatgagccatttttagttactgtttgtaagaggtctattgtcaatatctaaatttatttatttaattttggtaggtagatgtccagttgttattgaatcaaagtttttcttttaaaaaatctattgttacttttattaataaaaattacagtagttataaaattttgtaatagttatatgtagtttactctttccttgtaacgttacataaaaattgacttttattttagctaatatatgttacattgggatccactgctgacttttaaaaattacttataaggctttagaggacacagaaggaaaaatttatatattaatcttaaaaatatacacaaatcttcaactataaataaaataatacaatttaactatagttggtaagatgcattaacgtattccatgtccagctttaagccagggtgtattacaatgtatccttgaaaattcattctcaggcatgggtcaatgttacagtgtcagagcaaatccatttttgaagggcagcactgctgttcacttatagaccaaaaacctgaattagctacctgtaacacattaatgcttcactgcttccaaaaatagggaactggaattgaataagcagcaaggaatcttctccatcacattggtctttaatgttccacttacattgaaattcagaaatatatttgagaagtttaaaaacataatatgtcacttgttgtctataagcatattcgtaatgcattttactctatatttatcacgcacgtatctgaatgcatgcacccatttaaacaatatacgtgtgtgtgcacacatatgtgtgtatgatgtatataaaaggcatgttaagaggggacatagtaacttggaaagagcacaggttttaaagtgaaacagacctttcttaaaaatcatatttgtgagaaacagctatgagaacctgaacaatggaatttgcattttcttagtcataaaatgggaggtgcagtaatgtatagttacttcacagtgctttctcaatgaaagatgaaatacttgttgcaaaatgactcaacagtttctaacaccagaaaagcccttcataaatatttattattctttcgttttattctcctccaaatatggagttttcaatcaatgaacactcaacgtctgccttgattaataagagtcctacatattaggagagaggtaaaaataggaagggctcgtttacctacttttcaatatatctttaaaaataaactagtgggtagatctcacgaccctacgaaagaatctacatatataaaaatgtaacacaaaaatgaaaggttctttgggtcacagtgatactggcaacagaagccctggctagagaaaaagtggttggctggttcgtggctaggagtaagacaccctaggagtttcccagtgtgcagtgagacatgctcactattttctctgttaaagctgatgccaacggatagcaaattcctcactttcacaggcatccatggaaaaacgcatctgtacctggaatcatgcaccatgttaaaatccattgcagagcaaactagctcatcatctaggccacacaggagacagtttctaggaagatcatttcatcaggtgtcctctatcccctatattttacatttagttctctcttttctccatcatctaatcacattcttgcctattctttctcagaaagaaactttctcccatgtcgcctgaatccccttcttatgacccccttctactgcattccatccacagctgcatctacagagacttttcagcttccctccacttaccacctgcaagtcaacttcatcagacaccctcacccaggtataaatggaaagatttctactgaaactttcttcagctcatcagaggcttctagaatcaaaatccaatgaacatttttcagtttattatgtccttgttatatctacgggccttggccctggtcgcacaagaccacaagcccctgctcccaccacttctttccctctggagggtcctttccatgttcttttctgtcttttcctctccggccatttatgatggtaaattttctgtgtcaacttcactggggtaagggttgcccagatagctggtaaaagattgcttctgagtgtgtctgtgagggggtttctagaagatattagagtttgaatcggcagactgagtgaagaaccacccttaccattccacgggcaccgaccaacccatggcaggccacaaagaacaaaagataaacggtgaattttctcttttccagagctgggacctccatcttctcctaccctagtacatcagcacttctggttctcaggccttcagattcaggacaggactttgaccactaactcttcttgctctcaggactttggccttggctgagttacgccaatggctttcctggatctccagcctgtagatagcagatcatgagacgtctccgccttcataatcatagctaagtcaattcccataataaatatatatgtgtatgcatataaattatacatgctacatataatatataaaaatatatgcatagttatatttataattataatatttgtatataatacaacatatgcatatatatgtatatcctatctgtacactgctagttgtctctctctggagatccctaacacaccatccctgagatgttgattctcctctgcccctacaggatagcctcattcacgtacatgaagtaggcatcaccctgtgtgccctacatccttatctataattcatacccagacatcttctttgagctccaaattcatacatccaactaccttttggacttgtctatttgtatatttcatagtcacctaaaattcaatatatgcatcccccagacctgtttctaaattatttcatcagacctgctgttttctgtctctatcccaacccgtccacttattaaactaggcccccgttatccagcaagcctgggttctgcctctgtggtttccttcctgcggctgctgagtctgggtgttgccatctttcagattactaaatgtaaaggcattataactaggcttgaattttccaatcaattttccacgttgccacagcagtgaactttctaaaacacgtatctgaaaatattactttcttcttttatatttgtgagtggattttagaagaaaatacaacttcctagcatcagattgaaaaagaaaaaaagaaactttcattatatgcagcagcccacatttctggcctctttttttctaccaggtccctatgcacactctgctctcactgtatttacctgttcgtagatacttggataaaccatcatctatctctcaagtaatgcctgtgtcattctttactgtttttccacaattaaaaagacttaaacattatactcaatgaatgtaaaacgaatgattgagttctgtatgagaaatggtaaattaaaaagtctcttatctggagtagaagctataagcagatgattctgatacaaggaattttgaatgaaaactcttgtaccctggaaatttaatgttcaagaaaatagagtgttaatgtggcagagagaaacaagaatggttaggttttgttgttgttgcacggggattggacgggatatcccagaagaaatctgagcaataattcagccatgacaaaataaaggccgagaaaacaactttgttttgggtctggaaaacaaaagaagggtaattacatttattgagcaaatgtaggccaggcactcccaagcaatccagtactccctttaaaaaacattgtgggttacagccaacccttgcaatatattaaataaaaggcacagtgtaaagaaggaattacagcttgttctcatagtttatttgctttgatgatgatactgttttggatggtaccgaatgtctaggattggagactcctacaagagcttatgttgggcctaacatagcgccgtcaaaaattggcatttaataaaaaatgtacgttgagtgcaaaaatgaagttatctttatgaaaactatcgaaaaaagttcactttttaatttagtcatgtataagtctcatttttattttaataatatcaccccaagaagcaaatactctatcgtattttgtcgttcattgaatattcatgttgtatatttagacgcatagtctatttctttgttatgctataacattcctgactttcatataaatatgaaatcaatgtaattgcattcatataaagcaagacataagccctcagaatgaaaatgccatgcaaaaataaaaaatgaatgcctttcatgtcacactgaattcaatgcacaagcttttctttttaaatatataattaaatatgatttgattagtaatagatgcaaatggctttttttccccacagaatgatttcaaaaatcatcacaattaggtgtttgattttccatctacctgtctacaaagcatttctcttttttaactgatctccagttgtcaaggtaattacagaaccgctttgaaagcagctgcattcccaggtgccttcctgttagttcacgggaaaccatgcaacaacctgatatatggagagcatactgccttggtcttggggggacatgtgatgcgcgcaggaggtaaagtatttctctgtaccttaaaatacatttagaatcctgttaccttggaaatttctcttacctccatatttgatctatctaagttaattttgcataaagttttgagacgcaattgtatttttttatttccaagtttatcagattatgagtaattaagtatattttgttgacttttcacattcatttaatgtttttaacttcattaacttcattaaacttccataagtttgacttaagaaaagtggtcattaaaaaaatagcatcttgccccaattgtctttcttacacagactgactcaagggattcctctcagctgacttgatttctggaaatcactccattggcagcaatgtaatgttatcaaccctaccatattccagaatgccaaagaaattataacggaagaccaaacacccaggtgacttggaatgcgaggggaaggaaaagggtaaaagaaattattccagaaacaagaaaaatgactctctaataatggggtatattggttaacctaaacaaaacacagtaacagttttctaattgtgatttatttctatccatcttcttttgcttttttaattgactctgttaaataggtttccactgattcccagtcttccaataactctttaacctacagataattttgcaattcctccctacccaagaaagacagtcatgtgcacagcctcccgcattacgtgatgctggcactcttggatcaacaaagacatgaatggccgggcgcggtggctcacaccggtaatcccagcaccttgggaggctgaggcaggaagatcacttgagttcaggagttcaagaccagcctgggcaacatggcaaaaccccgtctctactataaatctataaatacaaaaattagctgggtgtggtggttgacacttgtaatcctagctacttgggaggctgaggcaggagaatcgcttcagcccaggaggcagaggttgcaatgagccaagatcttgccactgcactccagccagagtgacaatctaagactttgtctcaaaaaaaaaaaaaaaaaaaaaaaagaaaagaaaagacattacttaggtgaatggccattttcaacattctcttaaaatggtaacttttgagtcacatttctgttaatcaaggacaagagtggaggagaaaagtggctgcagcattcctttttgtcatcctcagaattggaacacccccatgtttggataggcgtgggttgctcggtagaaacggacttttccccagttctccttttctgcttggtgtggccacatgacgaaggtctcagcaaaagaagttcatgggatgtgctgtgtgcaactttccctgtacctcttgaaagcacatttctcagccttcacttttgcttctcatttccatggttgtggtttcacggccaactttgatcatgaggaatacaacacatttcattggaagaagcatacacacacgcacacacacacacacacacacacacacacacaaacccggtccctagatggcatagaaagctgaacatcaccactagcttagatgactcatttcttggctattaaaaaaactgtaaactaaaggtattgcatttttaggtcactttgatacatcagcttattctctatctttaactgtgcggaagctgttaaccaaaaactcctatttttgcaggataaagtttattttttgaaacattttttaaaaaccagaaaacacaaaagcaggtgatttttaaataggtaatgaaatcatagatgttgggatttaaaaggatctctaacagtttacctagacaaaggtgacaaatatactctcctaactcaccttgtctattatccagtccacagtgtcacatgtttaaaatcaatcttaacaactttttcttctgagcccggaggcagtttaatcatctttatcaacacagtgctctacaaaccaccaccaattggtccaagtcgacacagaaatggaaaactatttgctctccttgaaatactttgatcctatcattttacatactagaaaacggagacccaggacttggctcaagttagtttcctgagtatctgactatgagcatttcaacgaattcattaaaaagaaatacaccaaacaaaggctgcccaaattaatatcaggatttataaaatcctgccttttgaagtagtccttgacaacaaattctcaaaactagattcactattttgaatgttttaaaataaaatgtggttataattacctaaagagacactgacctgggtctggcaacatctatgtggagatcctgtgtatcttaccttccacggactcagctcagaaatgtccaccagctccaccaaccctcctgtaatactgaaaatcctcgaatgcagaggcaggctatctttttatagttaaaatccaactgactcaaggctgtatgtgaaacccaatctcttgtcttctcatggtcccccggctgtgagtgcctttggtgtgctgtgtacaccatttcatccactacccttaattctcctccccaccaaaccccatgcggactactgtcctttcttttgttttcacttagatcctctcattcttcacgaaggatttgacctgatggtgatattttagtttgcagaaaaacaacttgaaattgaatgctacctgcccaaccatccctatggtcttccctggctgactctctgcaggttccaggcaccaccatgtcaccccacactcaagatgctgccatcaaatccaggcttctcagtttaacatacaggacaatgttggtcccaacacttctcaggatcaatttatttatttatttattttttgagacagggtcttgctctatctcccaggctggagtccaggctggagtccagtggtacaatcatagctcactgcaacctctcaggctgaaatgatcctcccacctcagcctccctagtagctgggatacctggcttatgccactacacatggctaattttttgtattttttttttttttgtagagatggggtatcaccatgttgctcaggcagactcaaacttctggactcaagcaatctgcccaccttgacctcccaaaatgctgggactacaggcatgagccactgctcctagctggtcacattctttagcaaactaaaagatctagaagtagctttaacagtttaatttcaaaattactaatcaaattattgtcaattgaatgaaataaggaactgacatatgctagcactgacattaatggggtgtcttagaaggcacaaaatctaacatgcattgggattttaaacatcatttgttttttaatcttaagatacaaagcatgctattctatgtagcttggtctcaatgtgagcctccctttcaaggttagtaactcatctgctgtgtttctgcttcagaaggacctgggaaaatccttccctgaaacgttatgcatatccctacactcaaatctcacattcttttttttttcttttggcttctgtgaactttaaggaagagcctactcaaatcccgaatcctgtctcaaagacttgcatccattcccatctcctattggttcaacaatgtgaaggtgtagaaatagtaccaagaacagatttattgggtgggaaatttctgcccagatatatgcagaactctggagaagattaatgaagtcagctttccattccctgggaagcactagtatcttgggcatccggttctcctgaaatggacttctggaatcacagtgagtttcaattggggaaaaaaaaaatgaaagctgttttctgaggtaccaagcctagcaatcgatcttaatgagatgggtctattaccccatcacaagatgctcagaagctttaaaatttaaagtgaaactagataggcatcgtttgaacagtcatctcagaagggtggtaaagtgctttacacacctaaccccacctccttcacaggatagcccactgcaattatgctctagctggatgtttgtgaaaatctagctgagaagctcttcttttaaacctcttccctaggaacaggtgagatggcaagttcctattccccagaagggccaggccttccctcccgtctctttctgctctcttgtaccttgcttatgtatgctggctgcttggtgacatttcaccgagtcagaacatgaagcacgttaataataagctcacattttcaaaatgttaaaataacaccactctctaggtaccaattacttctttcaaagatagttttcgaggtacctatgagccccgtaccttgtgaacacctcactgttgctttgtacgttttcagttgtcgcctccctttcccatgtttcacatgtgtgtctgtggaactcagctctaaaatctggacagtctgcaaccatcataaatgtaacagttcctcattccacttcactccaaagactaagatttcatatatcagctctgggtaaaagtgcttcattttgtgtaattttcattaattactcctgacaggcatttataaacatttataaggcttcattttgtattattttcattaattactcctgacaggcatttataaactgaaaaagaatttttttttttttttttttacaaatgaaagcaaaccattttattcaaaaataaaggagggagagactgcttaaaaagagttttgatgttctttatgtgatttttttagctatcatatttaagaacacattaaacattctaaattagattatttttgatctagcactttagaaaccagcttagctctaccaatatagcatgaaaagcatcagtgagatcataactatcttcagcacatttcccactatttttaggattctagagtgacgttaattgtgcctcatggcaatgctattagtgtacagaatatttctaactgctcagagtaacgtgtaatcgtcctatgtctgccatgaaaagacttctggatcatctatttacaagggacatgattgggttagctgggaagacacaggactgggttagcataaaccaaaacaagctgcctaaaacaagcacaaaaaatctgatgactggttcagctggaattgacctcaatgtgaaggagtccatttagcctgtcacgctgatgtctgctggcatgagacagtctggccaaagcttagtagaccttgcgatctaaccgcccagtgttccacattatatccctgctgtctcgtcagtaccaaacttcaggtttttaatattgtgtgtaaattcaacatatttattatattagtcacttgtggaaacaatcgcgatttatttatttttttgaggcagagtctcgatctgtcgcccaggctggagtgcagtggagaaatctcggctcactgcaacctatgcttcccgggttcaagtgattctcctgactcagcctcctgagtagctgagactacaggcatgcgtcacgatgcccggctaattttcatattttcagtagagacagggtttcaccatgttgcccacgctggtctgaaactcctgacctcaggtgatctacctgcctcggcctcccaaagtgctacgataacaggcgtgaacaggccaccgcgcccagacacagtcactttttaacattagaatgttcacgtaataatttgagaatctggaacaaatttcctgtttaatttgtggctttatagaaattactggagtgataatagttgagttgtatggaagttaagagcgaagctgtatatgacatttaaatatcatacaccgttctcaggatgtgttgattttaccttattgctaagttgccataggcaacatttaccataaatattaaacaatgtgataagaatcatcataaatacctaaaaattaggtttgcaagttttactattgtagtgatgtattcgaactttattgagtgctagtcattggccagggaaacccatgagccagcagcgtccgtccctgttgaggcagtccagtattttctgagtaagcattgatggggttaaaagctgaagataaatagaaggttgccaggcccaggtggtgatgatggtgttcatggatgtgggatgctgtcttctaggcaacgaattcctgtgggatggagtaagccaagcctgctggaggggccaccagggcccctgaggaacacagagccagaaggagagcacgcaagtaagactcagagatgctggtaggagccagcccacgcaattccaagtaggccatggcaggaatttagctatttatttttaggaatgataggatgctttttgaaaggtttcaatcgatgtgaaatatgatcacttttacatttgaaaagatcattctgacttcagatggcagattggtaggaataagaatgaatgcaggaagaccagcttacgggttattgcagaaatctgagaggagatggctgttcggtcagggaagatgccagaaaaaagacaggtgcagtggcatgtttgggagatgctcagaaggaaaaaacaaatggacctggcaatggatggaacatgggagggacggggaatgtcgtgggccatttgggtttcctctccagcgcaggtgcatggagaccagatttggacatgctgttgtcaaggacctcacaaatcagggggcgattctgaaacaggtgaagctagccttcctgcctggccacttggttttctactctccatctgcatcccagttcctttttcctgttacaattgcctccaggaaggatcattgatacctcactttgggtttcagcagcttatatctctatggagtgttttaattcttcatgataaaaatgctgcttttgtcagaattcaatcagcaatggagaggaataagtctctttaggggtgagattcttcacaggagcctgcaccctttcagggaaaccataagaaagttccatttcagttaacaaatgcaaaataatactgagattgaaagaaaattagaaaacctattagcttttaatatactttaagccagagttataaaatacgaaaattatatctaaaagactgaaaagactttctttaaaaaaagtcaagtgtatctttactgtgtaaaatatgaagaaacttttcaacagttccttactttaggaagtgaatttctttttctatataaaatgattgattttctgtaagtatatttttgaacctctaaatgcttcccttatactcaatgaattaaataaaatataattattttagtttaaatttctcgaatttacttagggaatgtttgcatcaaatggaaaaacaaaataacgcagacattaagatttaataagtatgctatgcatagatccaatttttgtattaattcttttgaatttacgacaacattttattatggggatactttatatcagaaaagttaggatttctcccaggaaaatgaaagttattttatggttcttttaaaattaatcttgaccattttcataaattttaattgtaaaatagtatagaatacctattttaaataatgtttaaggttatgaagatgtccaaaaataactgtataacaattttaagagcattgtaagctggcaagactacacggagaggccagggtacagaggacatatcgcatccacactgtgctcatattgcttgctacagtctcatgaggaaagtctcgagcagcaccccgaataatcgaattatctctcaacctcagttccttctcggtacaacagagaaaataatacctacttgtctaaatagcaaagaataaacgaatagtatatggtaaaataatcctgttcattttttcccataaagtgtttaataggatagtgatagtgcaatgcaaacaacaaaagtttttttccataagtttaattagcggaaacacattgccacaaaatattcacaagatgagcatcgcaaagtcgaaaacctcaaatccaaaatgatccaaaacacccaaactttctgagtgctgacataaagctcaaatcaaacactcattggagcacttaggatttgggatgtgtaactaatacgtataatgcaatgattccaaactccctgcaaaatcaaaatttatgaaataattcttgccccagcatttcagataagtgatattcaacctgtatctgctttatgcttctttatgtaagctaatgtgcattctgaatttctaaaattgagattaagcaacatttttcaagtgtaatttttataaaggattttttaacaatcacttatgggtcatgaaacatactttataaaatgctgtcaaaatgcaatctctgccatatcctgggtgatttgtaaaggttaattttgcttttccttcctgcttagctccatcagttagaatttggtgacggattcgaggctgagttcaaacctgctaccagacagctaccctcagtgctattcctagaatttcttagctcttacaagctaaaggcatcaaattggtctatatttctatcaaagaaaatcactaggttctaactgaaaagaggaaaatgaaaatctagcagatgccttgatatgccaagatataatttgatagcattatctaagaattcacagcatagtaatccatctgaaaatctgcgaggttttttttttttgaaatgagatgaaatacatttttaaaagcacattgattctatcatttaaatgactgaagaaatattatcagttgagaaataaaatacatctttaacaacgtgagaatgaaggcagaaaaacaacagtattaagatacttaaaatgtgtgtgtgttttggggaggtgggggaagggggacagcagtatcccagaacagaaaggaaggatggaaataagaaagaaaggaagcaaggaagaaaggaatagaaggaaggaaaaaggtcagatttaataaatttctatacagcaaagggtcaatttcaaaggtgtttgacagcattaagatggcacgtaagtctccgtgccccacgttcaggttagatttcttttcatttctcgttacgtttcatagctctacatcagagtcacactctttttataaatgaaatgggagtcggacagtgtaaagatgacgtgttcagtttttagtttttcatcatatcttaggctatgcatatttttcaggaagctgataaataataaggtggccttatttttactacagtgaccagctgcctttgactgacccaaaatacagaccactgagctatggctaacaatgccttatgtcatactgactcagcgatgaatcaatcaattccacaaacatttactgaaatgtaaatggccaaggcacccaggaccttaaaaatcataataagaagttaatctgtgggaaaagagtaactacaaaagcatctaaacaagagcaggatgtgatgtaatgtgtccccttatcactttagtcagtaaagataagaaagccctggtgagtatccacttccacaaacacacagaatatacacttttggaagatttccacttaaccacttgattcttcacttttttatgatttaaaactctccgtagtattatattatgaagcaccatcactaaaacgtatttttcaaattaataatcttttttaactctaacaaagtattttttaacctaataatcagcttaagtgagggttgcagtttgacttcaaagtaacaggtaagtacaattattctcatgggattccactgagcttaagacaggaagactccgaaagcaagtaccttgctcaaacactagtccctaataaacaatagagactttggccagacacatggctcacacctgtaatcccagcactttgggaggctgaggcagctggatcatctgaggtcaggagttctagaccaggctggccaacatggtgaaactccgcctctactaaaaatacaaaaaaattagcccagcatggtggtggcgcctgtaatcccagctactccggaggctgaggcaggagaattgcttgaacccaggaggtggacgttgcagtgaatggagatcgtgccactgcactccagactgggcaacaaagtgagactccgtctcaaaataaataaataaataaatcaaatcaaaacaaaacaaaaaatagagatttcaactgatcatgtttttttttctgacctcctgtatttgatactttccctgactgaactggcttaaggcagtattgtttcttgattgtacattcatcgtagagttctttgcaaagtccccctttggagccctcatcttgtatttaagcagttatgaacagtgaaaactctgctgctgcatgtttatacttcactggggttaaatacgcaaataggcccttgcttggaatcaagatctggtctttgtattattgtcaacttatgagcatatgctggctttagtctcttatgactttaagttggataaacttaaaatgttggataaacttaaaatgaaaacaaaagtccaaacttaaatgtgtaaataataacagtttagagttgaattatggaattacagatgatttaattttcagttttctgtttccactctctggttatgttataaaatattaaaaaaaatcttcatatactatttcaccaaatacactgaaccatggcatttggaggctttatgaataaagaaggggttaaaatatataaccatggagtagaaaagtaagagataaaattcctttagaaaggtgagagacgagggttcatattaagttcttggaaactgatattcacttttgttgtgtgtgtaagtcatccataggaacttacataattaccccaatgttgtataaaattataacctctataaccaagcatataataaaattattaataattcatatttatgtaacctatacctgaaggtcagtaaaattgctaaacagcaaagatgctgcgtagcagctccatcagtctttctgttatttcacaaatagtgagtcagttgttatcagtgcagcctggtgcattttccacctgagacacacgtcatctcatgttcacttcgtgaaattctattcatcttacctttctccacttcatgccccttctccaggaaaacgttctagagcctctttgggtaacttgggtttctcatgaccctgggtttcctgatcataaaacaccagccatccctgtaatcacacgctgtggtcataaatgtgcacctcctggctgtgcttcaagagaaactgtggtcagaaatgcagttgacagacagcctccacctgccacccttggggtcctcgactgcatatccacagaggcctcgtgcttgggccacctccacgtggtgactgcaccctccaagctgctccaggaagcagcatatgctgagaaaaccgcgctcatctcaccgcactttctcagttccatgctgcaagaagcagcagcagcaaagctaagaagccatgtttgctcatttcctgccaaagtaatttcacaaagcccctgactatgtgacgatgtgcagttctctagaaagttgttttgaagacaaaacaggatacagcacgtggtctcctacatgtgttgcctgagtcattatatttcttcctgaaagataaatgttcctagtccttgccttttcctacacaaaagatcatgtctgatgggcttagcaattatgcttctgcaatctataaccaaatgtattttagtaacctataactgaatatcctctgacacccaaactttaacatgattttgcatgcatggaaacctctgctacctgtagatacagtgtgagctaaaacactgtgctggagcggtatggcagagcctccctgaaagccttctcccacggtttagtcctcatgtgacagtcctcagcaagacttctgaataaaacaaccttaactctttacaagcaagatttcattttttgttagtcgacaacactgtggtttgagactcttcggttcccatctttccttcctcctattcttcagagtgctgcacctgcactgtagcctgaagacttcctaatgattctgcctgttcctcttctgtccttcacaagagatgttcaccagcaaatctcttggacatcaaatcccacagtggtgtctcttcctcctaggactcaaacaggttcacttatcaaagatccgttttctctattacattttctatggacaaagattaagtcttccactgttctaaatatttcccaagtcttacacagtgctttgtgtgtagtatatattcaacccataccaatccacaggaattacaaatgataacaataaaatgatattattaaatgaaaacatcgaccaggtgcagtggctcacatctgtaattccagtaatttgagaggccaaggcaggtggatcatgaggtcaggagatcaagaccatcctggccaacctggtgaaaccccatctctgctaaaatacaaaaaaacaaacagtcaggcgtggtagtgtgtgcctgtaatcccagctacctgggaggctgaggcaggggaatcgtttgaactcaggagctggaggttgcagtgaatcgagatcatgccactgcactccagcccggtgacagaatgagactccatctcaaaaacaaaacaaaacaaaaaaaattctggccaggcacagtggctcatgcctgtaatctcagcactttggtaggctgatgcaggtgaagcacttgagtccgggagttcaggaccaccctgggcaacatggtgaaaccctgtctctaccaaaacagaaaaattagccagccatggtggcatgcaccagtagccccagctactcaggaggctgaagtgggaggatcccttgagcccaggagattgaggccgcagtgagccatgaatgagctactgcaatccagcctggatgacacagtgagactctgttaaaagaagaaaaaaagagagacagagagaaaagaaagtaaaagaaaaagagaacatcactgaaagcttattattttgcagacactttacctgtgatctctcatttgacttgatgaggcagaggttatgaacatacctgttgactgctgaggggatggagtcccagagaaacacagtgacttgttcaaagccacacagcgcatatgtcatgaagccagaatctcaaccaaagcagttcatccacaaaggccaggcgtttagacactgccagcccctcacaacgcccatccggtaaacgaagagagttaaggaagctttaaaatcacagaaaataaataaatagaaaaggaaggccgtacatattcaatgcagccagcaaagagacgtcaattacatgaagaagatggaaatatgttccctgatagaggagggaagagtgtaggaaaagctgcaggtatcgttaattaagagcagaaaacatacaaggaagcatgagcagtaggaagaaactagaaacagacacttgagccaagtcctggaagaaacgacacaccggtgttccacacgggaaatacacaggcatcattacgcgagcagagagaggacaacctgctggagtggaggactcagcaaggtcagtgggaggcccccaagaaatgggaaatggaagaagtggcacaccagagcccaaaagactgaggcatgaacctagccctcaaattagtaaattattttaattctttaatcagaagaagttgaagttataattcaactcaaactgtagagattgaattcattagaaatcttatcagtcgtaaaacaaacctggagtcagtaagaaaagataactttagttattaaataagtatacatgaaatggaacaaaaatgagcatatcctgactactgaaataatatctttaaaaatttaaatttcagaaatttaggacacatcagaaatgtcagattctatggagatccaactcaagagcaagtcacgccactggtgttcaggcccagaacaccatcagccagaaatcctacactgaccttcagacagatgcatgctggtggctgttagcagagtcaagaatatatatcctaaaaggtatatcatataaataaatacagcagatcatttattatgttagaatatcaggaagaattcaaatgcctccaaaatacccacaaaaaccttagtaagtaacctcctttccttcataataaaaataaatgtatatataaaaaaattaactctactttcttaaacagaagttgtcacaggtaagcaaaatctatcctgtaggtatggtagcactcacatgcaccatgaaaattccggtgttttaaacagtgttttatttgtattaaccaactccaaatttgggagatttctcatatgaatctgggtttctggaatctcctaaaaaataaaaacaatgggccgggcacagtgactcatgcctgtaatctcagcactttcggaggccgaggcaggcggatcacgaggtcaggagattgagaccatcctggctaacacggtgaaaccccgtctctactaaaaatacaaaaaattagccggacatggtggcgggcacctgtagtcccagctacttgggaggctgaagcaggagaatggcgtgaacccaggagatagagctttcagtgagctcagatcgtgccgctgcactccagcctgggtaacagagcgacactctgtctctacaaaataataataacaataataaaataaaattaaaacaatgatcatctcacattcaacaatgccaaggcacaggctctcccgttcagtattcctgtgccggctatacctgccctgccccacgcactgatactcctcaccacacatcctcactccaactgtagtgctttccttataaatgagttgaagacaatgacacatctctttaaaacaattaaaaccttccttccttaaaacataaaacctaaaagtgatgtaaaactttacacattacaaaatttaaaggaaattcctccttctttaatatgcaaattgcaactgtagaaaatgtgacctgttgacatgttaacatgactagaccatcggtgcaagccctgtcctaaatgtttctgtccccaatgtgtggccctgtcctcaatgttcctaagtataagaatatctaggatatctgctgagaagacttggagttgcgaagtaacaaaagaagtgtcactttatttaaaatgtttcttctgtagcacagttccacagaataaattccagcagaagactaaatatattgttttagctgttgaacatctgcagattcccaggaaaatgaggagttacgcccatggagttgcaactcatggaagcccagttagcgaacattcctagcatatcttaagtatgtcataagcatatttaaataaattgatgagataatggtcttccaatatttatattctataaaatgaacacgtataaaaggttcagaagataatggtcaagtcattgttgagctttcaaatatttttcttcacttccttcccctggacatgcacaaggaaaacaagcacaatatccttacagataacagttttataatttttaaatctgctcaaattttaattagcatacaagcagataacattttatatattttattttgtctgtctaggctgctataagaaaaataacatagattggttgaattaaaccacaaatatgtgttgctcactgttctggacagtggaaattcaagatcaaggtgccaggggatctagtgtctggtgaggggcctgatcctggttcagggacacacattcattccatgacatactttatctattataattgtgactcgatgttcgaaacagaagcattccaaattttataagcataaatactgataatcaatacagagaaaagtaagcaaatccaggtaacagttaagttttgtcacataaactaatctgacacttcactgaggaagcagataattctaaagtctatagtacctgagtaagctaacaatgaatgcataccctgataatagtgagggcattttgatggatctgaacatggagcataatgactgtcatcaaaaaagaaatcactagaacaagcacctagaatttaaaatatttagctttttcactcactgtgggatgcgtccagcatttactttgctgcttactattttttctgtgtcttgtttgtttacgtagcttaattcacccatttctctatgatatagttaatagcggcttttctagtgttatgaatttttgtgctcaaaagaatgtgggtgccttggcatggggaacccttggagttactgtaatgatagatgtctgtcatcttcaacaaaatggatttcaaggcctagatttaagataaacactgaagaaaaactttccctgagtgctttctacccaagaatcttctcacttttattagaagtacagcttcttatcactcagcctcagactgatttgactttccaatgatgaaaaacaataacaatagcttttcttatttatgttctatgtaataacttcaagggaaattggattaagaatgcctcattcacaatagtgtgcagaatattgagtgaacaagtgtaactgtaaatttctaaatcagtcttaggcagtgatggctaaccagtctgcctaaaaatggcttgtaacaagccatgtgcagctgtggtatgcccacacttaacctcttcattttacattgcagtggaataattcaatagcaattttttcaagtaaaatatagattttagcccaggcatagtggctcacacctgtaatcccagcacttaaggaggtcaaggtgggcgatcacaaggtcaggtgtttgagacaagcctggccaacatggtgaaaccctgtctctacaaaaaatacaaaaattagctgggtgtgcttacaggcacctgtagtcccagctactcaggaggctgaagcaggagaaccgtttgaaccaaggaggcagaggttgcagtgagctgggattgtgccattgcactccagcctgggtgacagcgcaacactccaccttaaaaaaaatatatacatatatatatatatatatatatatatatatatatatatatatatatatgtatacatatatatattatatacacacagacacgcacacacacacaaatttagtcattccagattttcttcttctgttgaaagaaatattaaattttcctcatagaaataatgtttttgtttcaatgagtgaaaaattatttccatttactatttcctattattctcagtataatctatatttgggtctattgaactattgtttattaattctattttacatataactttagcgaaacctcttataaggtattttgcctatgagatatattaactctgttcttcctcaatgcagttatccagaattgtactttccaggaatatacatcacatgatgtgaagataagaatgcatcttgctatcagcactgaatgatgagattgatccatctacaatagaccatgctagtcaaaatgtatacattcaacaatgtagctatgaaaatttcactaaaacactggtacctggcaccatctagtaagttattgacaaaatacatttagaaaggaaagccattggctcattattaaatgtatgacaagagtccatgaaaatggtttataagaaatttagttggccgggcgtggtggctcatgcctgtaatcccatcactttgggaggccgaggtgggttgatcacgaggtcaagagaacgagaccatcctggctaacaaggtgaaaccccgtctctactaaaaatacaaaaaattagccgggcgtggtggcgggcgcctgcagtcccacctactcgggaggctgaggcaggagagtggcgtgaacccaggaggtggagcttgcagtgagctgagatcgcaccactgcactccagcctgggtgacagagggagactctgactcaaaaaaaaaaaaaaaaaaaaaaaaaagaaagctagttttggtataattttggaatacatatatacaaacagtttcaaatatttgaggtggaatgtgcactttatataacaaaatttattttaatgaataaaatcgtatgtttgtttgcaaattgtttcagcaaagttatctgggccttactgtatgaagatatagctccatcttttctttaaaaaatattgacttggctgaatgttttccagcaatgagaaaaagtcaattcaggaatgaactaaaactttaaaataactctagcaatcgagactttagcagtctctggagaaaacatcactttctccaatgaaatcctgtatgtatttttcaaggtattaactggcgtcctacggagaagtatttgaaaagggggcttccataaatagcttaaatttattaatctgtattttaaaatgtatggctttgaaaataaatcacagcatcacagccctactcagagtattccatgaatgtttacaacattacttttatggtagcatttatttggtttatgtcacagagcatgaacagtggggattgaatataagtgagtgaatgaatggtttcattcactacaattgtaacgattgtgttatttctcagagcttgtaaaacccaataatgtttattaaaagtaagcaaaacaaacaagaacaagtgaaacatgcacttggaagagacctctgttgcaccaggaattagacacaatggtgcagctgtggagaaaacaacaacaaatggcatttttttcctacctcgtctcttttcttggaaggaggaagaaaagagcaattccaatgtactacttcttcccactccaacttagaaatcgcaggtagactgtgaaaacagacctttatttcttcattaagtgtctgaattagtcacaaaattgagcttgaaaaccccacagaaagagtgctctgtgcaattattatgagatgatgctcctcctttctcccaataaaggacgaaggttcttctgcccagatgctgattttcacaatacattatagctgggccaattccaatgttacttactgatatatgctatctacattgcacttatattaaactattgctggtcataaaattatcgtataccagaaaggaaaaaaaaagtgaggcagcatgagctaatgaatatttcttattaattcagactctacataagcatgctgagtaagaatatttagtcttttcattttttaatgagttcacttaatcaatgacctgaaattgcactttctgtccacgtaacagagattcttacagcacaaggactgttatttaactttgagtatcagtgattttcacagggctggatcagagcccattctaaaatgtgcttattgcatgtggactgatactgtaaaatgtgaatgcttggttaatgcaagaataaaaataaaatactcatattcaaaagcacattcacatctaagatgctttgtgtgtctttttaaaaaaatatataagttatgggatacatgtgcagaaagtgccagtttgacacatgggtatacatgtttactgcacccaacaacacatcatttacattagggatttcccctaatgctatgctatccctccccttaccccaccacccgaaaggcccgtctatgatgtgtccctgtgtccctgtgttctcattgttccattcccacttatgactgagaacatgcgttgtttcgttttctgtttctgtgtctttactgagaatggtttccagcttcacccatgtccttgcaaatgacatgaactcattctttttttatggctgcatagtattccatggtgtatatatgccacattttctttatccagtctatcattgatgggcatttgggttgattccaaggtttttctatactaaatggtgctgcaatacacatacgtgtgcatgcatcttcataatagaaagatgtataatcctatgggtatatacccagtaaagggattgctgggtcaaatggtatttctggttctagatcctttaggaattgccacactgtcttccacaatggttgaactaatttacactcccaccaacagtgtaaaagcgctcctaattctccataacctctccagcatctgttatttcctgactttttaatgatggtcattctaactggcatgagatggtatctcatagtggttttgatttgcatttctctaatgactagtgatgatgatcctttttttcatatgtttttggcagcataaatgtcttcttttgagaagtgtctgttcatatccttcacccgctttttgatgggttttttcttgtaaatttgtttaagttccttataaattctggatattagattaactctttgtcagatggatagattgacaaaattttctcccattctgtaggttgcctgttcactgttcactgttcactgtgatgatagttttgtttgtttgtttgtttgctgtgcagaagctctttatttcaattagattccatctgtcaattctggcttttgttgccatttcttttggtgttttagtcatgaagtctttgcccatgcctatgtcctgaatggtattgcctaggttttcttctagggtttttatggttttaggtctaacatttaagtctttaatccatcttgagttaatttttgtataaggtgtaacgaagtgatccagttacagttttctgcatatggctagtcagctttcccaacaccatgtattaaataggaaatcctttccccattgcttgtttttgtcaggtttgtcaaacatcagatggttgtagatgtgtggtgttatttctgaggcctctgttctgttccattggtctctatatctgttttggtaccagtaccatgctgtttcagttactcttgtcttgtaatatagtttgaagtcaggtagtatgacgcctccagctttgttctttttgcttaggattgtcttagctatacgggctcttttttggttccacatgacctttagtttttttctaattctgtgaacaaagtcaatggtagcttgatgggaatagcattgaatctatatattactttgggcagtatggccattttcacaatattgattctttctatccatgagcatggaatttttctttccatttgtttgtgtcctcttttatttccttgagcactgatttgtagttctccttgaagaagtccttcacatcacttgtaagttgtattcctagatattttattctctttgtagcaattgtgagtgggtgttcacttatgatttggctctctgtctattgttggtgtataggaatgcttgtgatttttgcacattgattttgtatcctgagactttgctgaagttccttatcagcttaaggactttttggactgagacaatggggttttctaaatatacaatcacgtcgtctgcaaacagagacaacttgacttcctctcttcctaattgaatactctttctttctttctcttgcctgattgccctggccagaatttccaacactacgttgaatagcagtggtgagagagggcatccttgtcttttgctggttttaaaacgcaatgcttccagcttttgaccattctgtatgacattggctgtgggtttgtcatacacagctcttattattttgacatatgttccgtcaatacctagtttattatttttagcatgaagggatgttgaattttatcgaaggccctgtctgcatctatcgggataatcatgtggcttttgtcactggttctgtttatgtgatggattacgcctattgatttgtgtattttgagctagccttgcatcccagggatgaagctgactggatcatgttggataagcttatgatgtgctgctggatttgatttgccagtattttattgaggattttcacatcgatgttcatcgggcatattaggcctataggcctgaaattttctttttttattgtgtctctgccaggttttggtatttggatgatgctggcctcataaaatgagttaaggaggattccctctttttctactgtttggaatagtttcagaaggaatggtacaagctcctctttgcacctcttgtagaattcggctgtgaatctgtctgtcctgggcttttattgtttggtaggctattaatcactgtgtcaattttggaacttgttattggtctatttcgggattcggcttcttcctggtttagtcttgggagagtatgtgtacccaggaatttgtccatttcttctagattttctagtttatttgtatagaggtatttatagtattctgtggtggtactttgtatttctgtgggattggtggtgatatccctttatcttttttttatcatgtctatttgattcttctctcttcttcttctttattagtctggctagcagtctatcaatttgttaatcatttcagaatatcagctcctggattcactgaggttttgaagggattttcatgtctctatctccttcagttctgctctgatcttagttatttcttgtcttctgctaggtttgaatttgtttgctcttgcttctctagttctttcagttgtgatgttagggcatcgattttggatctttcctgctttctcatgtgagaatttagcactatgattttccctcagaacactgctttagccgtgtcccagagattctggtacattgtgtctttgttctcactggtttcaaagaacttatttatttctgccttaatttcgttatttacccagtggtcatttaggagcaggttatcagtttccatgtagttgatgcagttttgagtgagtttcttaatcctgagttctaatttgattgcactgtggtctgagagactgtttgttatgatttatgttcctttacatttgctgaggagtgttttatttccaattatgtggtccattttagaataagtgctatgtggtgctgagaagaatgtgaactctgttaatttcgggtggacagttctatagatgtactaggtccactgagttcaagtcctgaatatctttgttaattttctgtctctttgatctgtctagtattgacagtgggtgttaaactctcccactattattgtgtgggagtctaagtctctttgtacgtctctaagaacttgctttccgaatctgggggcttctatattgggtgcatatatatttaggattgttaactcttcttgcattgatccctttaccattatgtaatgcccttgtctttttggatctttgttggtttaaagtctgttttatcagagactaggattgcaacccatgcttattttttgctttccatttacttggtaaatattcccccatccctttatttggagcctatgtgtgtcttcgcacatgagtctcctgaatacagcacaccgatgggtcttgactctttattcaattttccagtctgtgtcttttaattggggcatttagcccatttaaatttaaggttaatattgttatgtgtgaattcgaacctgtcatcatggtgctatctggttattttgcacaatagttgatgcagtttcttcatagtgttgttggtctttacattttggtatgtttgagcagtggctggtaccagtttttcctttccatatttagtgcttccttcaggagctcttataaggcaggcctagtggtgacaaaatcccccagaatttgcttttctatggaggattttatttctccttcgcttatgaagcttagtttggctggacatgaaattctgggttgaaaatacttttcttcaagaatgttgaatattggcccccactctcttctggctagtagggtttctgcagagagatccactgttagtctgacgggcttgcctttgtgggtaacccaacctttctctctagctgcccttagcattttttcctgtgtttcaaccttggtgaatgcgatgattatgtgtcttggggttgctcttctcaaggagtatctgagcggtgttctctgtatttcctgaatttgaatgttggcctgtcttgctagagtgaggaagatctcctggataatatcctgaagagtgttttccaacttggttccattctccccgtcactttcaggtccatcaatcaatcatagatttggtattttcacacagtcccatatttcttggaagctctattctttcctttcattcttttttctctaatcttgtcttcatgctttatttcattaagttgatcttcaatcgctgatatcctttcttccgcttgatcaattcggctactgatacttgtgtatgcgtcatgaagtccttgtgccgtgtttttcagctccatcaggtcatttatgttcttctctaaactagttattcaagtgagcagttcctgtaatcttttatcaaggttcttatcttccttgtattgggttagaaaacgctcctttagctcagaggagtttgttattacccaccttctgaagcctacttctgtcaattcatcaaacgcattccctgtcccgttgtgttcccttgctggcaaggagttgtgatcctttggaggagaagaggcattctggtttttggaattttcagcatttttgtgctggtttttcctcatctttgtggatttatctacctttgatcttttatgctgatgacctttggatgggattttcgcatgggcatcctttttgttaatgttgacgctattcctctctgcttgttagttttccttctaacagtcaggcccctcttctgcaggtctgctggagtttgctggaggtccactccagaccctctttcctggggtgtcaccagtggaggctgcagaacagcaaagattgctgcctgtgtcttcctctggaagctttgtcccagaagggcacctgagagatgccatccggagctctcctgtatgagatgtctgttgatccctgctgggaggtgtctcccagtcaggaggtatgggggtcagggtcccacttgagggggcggtctttcccttagcagagcttgagtgctgtggtaggagatctgctgctgtcttcagagccagcaggcagaaagagttaggtctgctgaagctgcacccacagccactccttcccccaggtgctctgtcccagggagacaggaattttatctatgagccgctgactggggctgctgcctttctttcagggatgacctgcctagggaggaggaatctagagaagcagtctggctacagtggctttgccgtgcagtggtgcgttctgcccagttcaaacttcctggcagctatgtttacactgtgagggggaaaccacctactcaagcctcagtaatggcagacatccctctctccaccaagctcaagtctcccagctcgacttcagactgctgtgctggcagccagaattcccagccagtgaatcttagcttgctggactccatgggggtgggacccactgagcaagaccacttggctccctggcttcagccccctttccaggggagtgaacagttctgtctcgttggggttccaggagacgctggggtccaaaaaaaacctcttgcagctagctcggtatctgtctgaacagctgccgagttttttccttgaaacccagggccctggtggtgtaggcatctgagggaatttcctggtttgttggatgcagaaactgtgggaaaagcatgctatctgggctggatagcaccatccctcaacggcgtagtccttcacggcttcccttggctaggagagggggttacccagccccttgcacttccccggtgaggcaatgccccacccttcttctgcttaccctccgtgggctgcacctactttctaaccagtcccagtgaaatgatccatgtacctcagagggaaatgcagaaatcacccgccttctgtgatggtctcactgggagctgcagacgggagctgttcctattcggtcatcttgctgagttccaactgctttgtgtgtctcaatttatgtgtccatgaatacattaatgggagacacttaaagaattctgaatctttgaattagctatacgctctcttccagatatgtggggaaaactgtcttcttttcaaaactaaccatagacacacacctttatcatgaggtgtactgatgaagcacaatgaaagcaacactcatagtttctgcatttgccatccaatatcaaaacaaaactaaaacaacaaaaatctttcatgattcaagtgcttcttcgtccaaaatttaatttaaatagactttctttgtgaaagaataacatacacacatataattttgttttaatatcttttagatcaagaactattcctaatgacctctatgaaattcaggtgaaattcggttttaatattgtgcttcctcagtaaataaaaggagaaagggcccctggaaaaccaggttttttaaaagtatacttgtaatttactataaaatagaatccagccaaaatgcactaacatgtaaggtgcatagttcattctttcattcaataaatatttttgcagtctctatagcactgtggccaagaactgtatcttatcacttgacctcttccaaggttactataattctcctaaaaatacagttactgtctccttttacaattaaaaggtggagatcattctcattattttcatatatgattggtgtccctgtcctttttatgtaataatgtgattctgcaaagtggcaataacaggtcacatttttattaaagttgcgggatgaaaaggaagctggattttagaaatttaagtcctgggttgtagaaccatttccactacatattgtctgtgtaacatccggcaggtcattaatttctctgaacgttatctgaagaaaaggaataatgcaggtatcctccagaggcatcaccagagtgcagaagggagagcacctcttggccatcaaactcactttgagacagaaagttgtgtccactgtgaattcattatgatatggtagacatgtggctcagtgcatttgaactccagttccccttgcctatacaaaggaataaaattgtctaaatacaggcaacattttgaagatttaaaatatgttaataaatttacatgaccaagagaagtattcttgattttcttctctcatactccacaagtgcttatcaacaattgctggtctcatctccggcaataacaagctagtctgaggtcgcaatgtccttagactagatcatctcagtcgccttctaaagacttgcaaacttgctgtcattcattccccgtgttacagctgttgtgatcgttccagtgtaaatcaaacaatcccacagcacatcaccaaatcaaactcgtaaatccacctccaccaccacagcctcagtccaagctgccgtgatctcttgggtggaaaaatacaattatttactgcattatctttcaacatccactcttctctcaccagtgctccacatgccagcataattgaccattcaacctcctctttattgctagcctatccctcttagaataattgcagaaagtatgcaggactgtcgagttatgtgcactaagctgtatcagctctgtaggctacactactccagtccccacctcgtcttctgaattccaggcacccttctagttcctctacaaaagcacaaggcttcctcttgccacagggcattgcctgggttctcctctcattcttttcttttctcctggcttctctcctgctcactcttcaggggagagtcagaggcatttggccaagaccttcccctgtcccattccccagactagattacctcttcttgcaaaatcctcttacagtttttccttaatagtccttcgtttggctggaaggtatatattttttcacatacagtttctaataagtaactctctcctactataccaagatagcaaggactgtctctcaccttttttgttggcagggggtggggtgtggcgttgggttattgtccatccagtatctagcttactctgtatatatatagcatttattaaataaatatttttggatacatgaaaacaatgtaaaataatagccttcagtcataagtagctagaagtctgataatctctttctaaaacttaactaaattttcagaaatatatgttaatatcaatatgtatgctaattcaagtgatattaagatatttaccaaaaataatttaaatattaatacttaaaacaaactattttaatttcatgtacatttccacaaatgctttagtcacatacttcagttatgattaaataatttttccaggaattaatagaatgattatttagatttacttatgtagaaatcctccaagctctcagctaagttttctaattcgatgaacacagtgtgattctatctccatggtgacagatattagatcttgaatttttatttctttaatattgctttgattacgaacaggccaaaaatgattatatgataatttgtatatacacacacatatataacgtgtataatttatgctaatcttctgcaatgtttccttgggttttttttgcactgatttttaatacatttattgaagcgagattttcttttgaatgtatcaaaatcaaatatagaatgtaagaaaggaaaaaaattcacttagcagtctgtgaagctcctcagatgggctgacttcatagctgctctcttgggagactaaaattatttcaataatgatgccccaaaatatttaggagagcttatttcagaattaccttctaaacctgtggcacatttctttccatcctctcaagtcggggaaatgttcttggacactctgctctcaggaacccaacaggctcccagctccaagcgtgctcccctccttcctcttccctatgccaccacagcacccaccttgccatccacagcccatccacaggctccagtgtggcccacggcatccttcctccgggtgtgaaattgcttttccctcaggcaggatccagtatctcttcttcaccaggtaagtcttactcttcacacctcaacacttcagtttctctatgaaagcttcccctgaatgctaagagaggacaaattgctccttcaaagtgcccttgcaccctaacacagtgttttcatgggtatgctgtttgattactttatctgcctgtccttaactgaaagctcattgagaataaaaaagatacctgatttagagctacattccttggccttgcattttccctggcacatagcagacctcaagtgaatatatatttaataactaaatatatagtaaatgtatcaagtcctaggaaacaagccttagtgcaattatgatattggatggccagagaaaaatgacatgggtctggtttctatgtaaattttggactttcggggatcacatatttggtggacccagggctcggctttaggactgtgtactcattaatgtgtgtaaaaagttgactgtgcaagtgcacccgagttagctcagagctgcttctagcaattttaatctatactcaaagtcccccacatcttaccacaggctgataaaagagcattttttgttcttttttgagaggaagtctcgctctgttgcccacgctggagtgcagtggcgtgatctcggctcactgcaagctctgcctcccgggttcacgccattctcctgcctcagcctcccgagtagagtagctgggattacaggcacctgccacgacacccggctcattttttttttttttttttttttttttttaggacagacggggtttcaccgtgttagccaggatgttctcgatctcctgatctcatgattcgcccacctcagcaagggactacatcatattcttcactgtgaattaaataaacataaatccttccacaaatattcagagtattaatttcctgttttattataaaacctatctttggctgggtgcaatgcttcatgcctgtaatctcggcattttgggaggccaaggtgggcggttcacgaggtcaggagttcaagatcagcctggccaacatggtgaaaccccatctctaccaaaaatacaaaaattagctggacatggtggcaggtcctgtaattccagctactcaagaggctgaggcaagataattgcttgaacctgggagggggaggttgcagtgagctgaaatcgtgccactgcactctagcctgggtgacagagatagactccacctcaaaaaaaaaaaaaaaacaaacctatctttacaagcagaaatggcggcattatagaaggcacattttactagatcattattttgaaatcaccatgtgaaaaccaccatgtggaaaaatattaaatcaatacatttaattaaaatgattaacctttttaaacagcatcttttcattaattaaattgaaaattgtacataaatgtttatcacataaaggcacaatgttagacactgcaaaagatatctttctgcaataaactgttccatttatacagtttataaagagtaaggacaataaaacatgcaggaagagcagtaattgcagaatgaaaaagtggcctgtgaggaatatgtacacactaagaatttaaaaagtcaggtgtggttgctctgacggaatcaggaaaataatcctcatgccaacggcgaagtttaaacatacatacatatatatacatatatatatgtatatatataaaaaatcctcttgccaatggtgaagtttaaacatacatacatacatatatatatacacacacgtgtgtgtgtgtgtttgtgtatgtttgacagaattttgctctcatcctccaggctggtgtacaatggcgtgatctcagctcagtgcaacctccgcctcccaggttcaagtaattctcctgcctcccttagcctcttaagtagctgggattacaggcacccgccaccacgcccagctaattttttgtatttttagtagagatggggtctcagcatgttagccaggctggtctcgagatcctcacctcatgatccaccaaccttggcctcccaaagttctgatattacaggtgtgagccatcatgcccggccttaaacctatattttaaggatacttctgaagcaaaatattctggaaactccatgttttttacatggtgaatttccatgtaaatttacatggtgaatttttacaggtgaatttccaattttatttccattattggcttacttgtgttccatgtttctgttaaattctaggattcaattctcagataaacatttcccaagtgtaaaactttacctagttttcctaagtcttataagggtataattaagtctttaactccagatgcatagctcgatttcctgtattttatgtttacatttccaaatccctacttgctttttattttcttaaatactaccatttccatgtgaactgtcacatctttatagtagtaactgtgaccaacctacatgagtgtgtttctctgcttttgtttctatatttaaagagggtgggaggactaaatattttgtctttaaaatgtattaaacacctatgtggccctgactgtaccaggcactgctttcaactgttatgtaaacttcatggaatctagcctgagcttgccccctgctgcccttccccttgtgggtactgccttaacacgccctctgctctcggctgtggtcatcacccagccaggtgtctccatgctcattaatttatttccaggaaggtacatgaaagacatgagccctgtatcatatatctttttaacattttcatcgcagtgttgaccatcttcctttgttgtgtatcgtgtaacacaaataatgatattaaaagcataaaaaaaactattgcatccactttacaggtgagaaaattgaggcatagcgaagttatggaaatttcctaatatcatgaggttctggctcgggccgtcgggttcccagcttgagttgttccccatgtcgggcgtctcatgaggctcctcctttctcctcttccatctcacccataactgctctctcccctccttcttcttcgtggcatcacataagacattctcttctaccctggctgagcaaaatgcaccgcgtcttccaaggtaaatgcgacaacaccaggaagcccttcctgattaaatcaccccaaatcaatctctctccctttgaggttctcctaacattttatttccttatgatagtgttaattatatcctatcttaaaaagttgtatcttgtacatactgcccgcttcatactggattgtaaattcacggaatgcaaataatttattgcatttttccctgctattgtgtttgacatcatcggaagttcaatgcacatttttacatcacttttaggtgaaaagatagacaacgattgtccacctcagtccttattccagtgcctcacatgtaacagacatgtggtcatggctaggtaaatcaatccatggagcaaagactgcatatgaaactagtttacatgactacattttaaggtaaacattcaaataatattaactgaaaatgaacggtagaaagaatctttagtcaaggataccatctatgaacacaaatttctattttagaatttagttgacttgttgataaaactaatttggcaatgaaaagaatgtttcatataaaattaataataattgggcatttcaaaatgtttatttcatgaagaaaaaagaacaagacacatgcagaggaagtaatgaattattttaagttgaatatatactactttaattaaatcttactacctctcgatatactgtacatttttaacttatatgtttaagatatgactccaatttttatctttttgagcttggcagatctagcaagcagttgttttctattttgaaaactgtttttgaatatgagataatcttatgtagaaaaagggtttgagaagcatgcattattttaaatacataacagattcattttagccagcattgtaaaaaatactcaatatatcattaagacacattttagaagagactatatttaggaattgattcctcagtgttaaaagaaagttagtggaaaggggagttcatttgaatctgtctatgctcccagttggggtcacataagcaggtcggttttaacagcttccagagaattcccagagggccctcacctcagaccaacaagaccatcttggcagacaattgcctattggctattgctaggctctgagcaaatgagtcaggaagcctgggagggcacaaagcactgacccaaatctctggactcttctacctcctccagatctgctgtgaattgtcccctacatccaccatcaacttgagtctcacagtacagtcaggtcaaagaaagagttggggctaaggaagcatttgatggaagacaaacgacgatggctaaaatctcagtagcctacgatgatgaaatgaaacagcatcgcagagagagaagcagtcatgggacactgcgttccgagcctcttttttttttttggtttgttttgtttttattatctgaactgatgagctttgtgagtagcacatgaggaataatccttccctggcatgtctgtagtgaaaattgacagacatgaggtttgtcatatatctgacacccactaagcacttagaattactgtcaataataataaagggctgacctaaaaaatggtcccggacatgatcttccggctaagataaaacagcttgttatcagaccaagtctcctgcagagccaaattagaaaagcgggataaaatatattacaagataaacataattgttttgaggacaaaggagagattatcagggctgcaacaacttgaggagccagaataacggagagaaagaaaacacagagtggtgagcccaatacagatccactctttcctccaggcaccaggcaggaaatggagaaactaagtcctgtagtctcacaggagtgagagatcaggaaggaagacagtctctagcaagctccaaagcccacagctgaaggtcactgaagggctacacattagcaaggatgcacctggaaatgcaccagccctcatagtgagaggtgacagcaggctggcagtcctcccagccctcgctcgctctcggcgcctcctctgcctgggctcccactttggtggcacttgaggagccctttggcccaccgctgcactgtgggagcccttttctgagttggccaaggccggagcccactccctcagcttgcggggaggtgtggagggagaggcgcgagtgggaaccagggctgtgcgaggcacttgcgggccagctggagttccgggtgggcgtgggcttggctggccccacactcggagcagctggccggccctgccggccctgagcaatgagggacatagcacccgggccagtggctgcggacggtgtactgaatcccccagcagtgccagcccaccggcgctgtgctcgacttctcacccggcgttagctgccttcccgcggggcagggctcaggacctgcagcccgccgtgcctgagcctcccacccactccatgggctcctgtgcggcccaagcctccccaacgagcaccatcctctgctccacggcacccagtcccatccaccacccaagggctgaggaatgcgggcacacggcacagggactggcaggcagctccacctgcagccgtggtgcgggacccaccgagtgaagccagctgcgctcctgagtctggtggggccttggagaacctttatgtgtcttcctcagggattgtaaatacaccaatcggcattctgtatctagctcaaggtttgtaaacacaccaatcagcaccctgtgtctagctcagggtttgtgagtgcaccaatcgacactctgtatctagctgctctgatggggccttggagaacctttatgtctagctcagggattgtaaatacaccaatcgacactctgtatcttgctcaaggtttgtaaacacaccaatcagcaccctgtatttacctcaaggtttgtgagtgcaccaatggacactgtatctagctgctctggtggggccttggagaacctttgtgtccacactctgtatctaactaatctgatggggtcgtggagaacctttgtatctagctcaggcattgtaaacacaccagtcagcaccctgtcaaaacagaccactgggctctatcaatcagcaggatgtgggtggggccagataagagaataaaagcaggctgccccagccagcagtggcaacccactcgtgtccccttccacactgtggaagctttgttctttcactctttgcaataaatcttgctgctgctcactctttgggtccacactgcttttatgagctgtaacactcaccgccaaagtctgcagcttcactcctgaagccaacgagaccacaagcccaccgggaggggaggaacgaacaactccagatgcgccgccttaagagctataacactcactacgaaggtctgcagtttcactcctgagccagcaagaccacgaacccactagaaggaagaaactctgaacacatccgaacgtcagaaggaacaaactccagacgcgccaccttaagaactgtaacactcactgcgacggtccgtggcatcattcttgaagctagtgagaccaagaacccaccaattccggacacattttggcgaccacgaagggactttcacctatcgccaagcagtgagacaatcgccgagtggtgagaccgtcgcctatcgccgagtagtgagacaatcgccaatcgccaagcagtgagtagcatcagacccctttcgcttgctattctgtcctatttttcattagaattcgggggctaaataccgggcacctgtcggccagttaaaagcgactagcgtggccgccggactaaagaaacgggtgtcaggctttctgggaaagggctctctaacaacccccaactcttcggagttgggaccgttggtttgcctagaaccagcttccgcttttcctgtacttctgggctgagccgagggtctacagagaggaaagccatgcagctccggggtcccaacaacatgttggttgaccctgtggccatgaccggaactctcaaaagcatgtcgcccaagccagacttgcccatctatcctatctatcctgacccttgccctctgggtcctaatgccggccagacaaacttcctctcacctctcctctctgaggttaggcccgcttctaaaaattgctacctgtctctggtgcttttctagtttctcctataagaaaaccagcttttatttagattggatcaactgtggattgcattggattggattaagcagctcaaatttagactggattaaggagatcagccccagtctaactgcctgccagaaacaaaataaatggtctctggggaaatcaaacctcaaccagactctcaaattatttgtacaatttttcatacaaaagattctatattttaaaaaaattacccagcataccaggagaaaagaccaagtgatcaaaaactgagaaaaaaaaaaaaagtacaatagaaagagactaacaggaagtgtagatattaaagttagcagaagttgcctttaaaataactgtgattaatatgttcaaagaaataaagagcaccataaagaacatcagcagagaactgccatctacaaagactggagtcacatggaaattctgcagttgaaataggcagtcccagaaattaaaaattaagctaattaatagcagattaggcaaagttgaaaagaggattagagaactagaaaaaaggttaatacacaatttttgaaagagggataacgaaactaatagtaaatgaagaatgactgtcacaaaacgtggaatatgggcaaaataataaataacatttcctcataaggagaaaaaagaaacaatggaatgaaagaagtatttgaagagataatgacagataatttactgtaactgattagagactttgagcagaagtgaaaaggtagaattcagatgaaagaaaccaaattacaaagagaaaaattttaatcatagaaaaaggactggcaaagaagcaacaataaaagttacagaagattttgcaatggaaaaaaattaaagccagaggtaatgaatgctgtctttaaagtgctataataaaatgatgaccaacatagagctctatacaaagtgaaactatcctatagaaattgaagacattttaagttaaattaaatctgagtaaatactctttagtccttttcaggtcgaataaaaattatattagatgaaagcatgcaggtaaagatggaataaacagcaatacaaaatgtaagctgatgggaaaattatatgtaacaataaaattattgatttgtgggatttaatatattagcaaaataatttgaaaattaattcaaacttttaatgactattttcatcattacctttttcattattatgcgcatgtaatggttgtacgtatacatggagtacacatgatattttcacacaagcatacaacgtgtaatgatgagatcagggtaattggctatccatctcctcaagcatttgccatttctttgtgtttaaaaacatgccaattccactcttttggttatttttaaatacataataaattattgttaactatggtgaccctattacacttccaagtactagttcttattcattctgactgtattttagtacccatcagccattcccaatttttccccaggcaattcccattggcagtgactaattgcttgtgtagagatagatttctctcacagagtgttgattttaaaggttacataaactgttaaagtcacagaccaaacctgttacagacttaacctgttaagctcatgtttcaaattcataactgtgatatttactggtttaatgataaaaatcacacctagttccttctggatgagccacagcttggcaattttccaggaaaaatcaatgtttttatggacgtaacctttttagcattttttttgatgctttattttctctaggacttttggataaacactgttccctctcagtaatttatatcataaaaacacagcactaaaatccctttttgttttattcacatgtatatgaaataccgccacaccatattccttaaagcatcatgcctgtgagagagatcctccatgaatagctgtgcggttccccatggcactttctgtgctcctccaggatgatactgggctgcagctgttctgcacacaggtctgcacgcacagtaggatcatggcaggtgttcaactttttctatccagtatctggcatagtatttgataagagtgcttaactttgtttgatgaataaataaatgagaacttgcatgcatgaatctgtactgtgtaagagaggttacatctatataagagcgcctaaaaagttataatagagatacccattaaaaataagtttagttaattttgaatgaatgctttcatctcttttaatccatgaaacattgcttttactattatatatgacaatatcctacagaggccaatagattaggtgcgctctcttcttccacattgatttttctgcccatcgtgagccaaccagcttttatggcttacttgaagggtatgtaattccttcagtaaaaaatgagttttctccacttgtctgttgttttacactgaaatgagtactgggaactgatgcatagtttgaagagcttaatgttcttttactcactttctctgcaaaaataattacacaactgtaaaactgtgagcttttcaaagcatcaagttcttgatatatatgtatatgtacatacatgtatatgtggatatatatgtatatgtacatgtatatgtggatatatatgtatatgtacatatatatgtatatgtagatacatatgtatatgtacatatatgtatatatatatgcacacatgaatttctccttgtccaagtgtctaacacctaaggaaatttattttgatacagaacctttcctagatgtgtaaaagaagaaataagctttacttacaaataattgtactcagactcatgatcacgatctcatttactgaagagaactatgtcttatgaactatgccttcactaggtactggttaagagattttctccacttatgacactcttcataaagtaaacattaagactttgcatttatagtagatgctaacacaagcacttttcacattatgaacttgtgggtaccattttgttaaaacattttgcctttccacaactctgtaactataaaaaattatgaaatttattgaaatgtaaaaactgttgtccctttaaaaactgaagtgtgaatacttttaaactcacttccagtgatagaaggagattgtgtgtagactttaaagtatacccagcaacatcaactagctactttcctgaatcgtgaatgcagcaccatttaagcaagcataggaaaaagaaaactaacaaaaggagcaaggtaaagcaaaatctaatacatgttcagtattctaaaatgcctctggcttccctctagctagagtggataataatttttcaaagacgggcttattttaaatggctagtaaaatgatatcaaacattttcttaggcatatatttaaatagagaagaaatatattgctggtgttgattacaactcaatggccgtcagaagacagtaacttttaggattccattaaatgctgatactagccaaaaagaaaaaggaaataaaacatcagaccacagtttcaaatacagtatagagagcacacactggctatgctatctagagacagagataaagaactatctcataaagacagagataaagaactatctcttcctctagatagtacagccagtctgtcctctctgcactgtatttgaaacagtggtctgatgttttctttcctgtttaagaaactctactctggccgggcatggtggcacatgcctgtaatcccagccctttcggaggccgagtctggcggatcagcagatcgagaccatcctggttaacacggtgaaaccccatccctactaaaaacacaaaaattagccgggcgtggtggcgggcgcctttagtcccagctactcaagaggctgaggcacaagaatcgcttgaacccgggaggcagaggttgcagtaagccgagattgcaccactgcactccagcctggcgacagagcaagactccgacacacacacacacacacacacacacaaaagaaactctactctgtgcttgattctgttcacaggctgctgctcaagcttccactgacgcgaatgtgatgtggcattaaaaacactccagggtgccctttcacttggaaaaaatatacatacacatatacattgcctttaagtatagtagagccaagtacaatatactatatataatatacattatataaacacgttatgtatacattatacaacgtgtactacatgcacattatataatgtgtaatagtgtaaaaatagaaaaataaaaaatatgttgtccttagactatctttaatttgtaaatgtttcaaaaagagaaactagaattttcattgctctcaatgagaaaagaaagaaaagtgcaaaaaagggaattggatagagccttatcagagttatgtaaaagaactacatttttctatattggaaaataaatctaatttttatttctaaatttgtgttttgcctctgcatatattatgccaataagaatgatgcctcagtgatctttagccatgttttttctgcctaattcaaagtattaaccataatatctcactcttctcagggactctgaaccaaaaaccaatgatagtaaggaatagactatttcttttttaccaatactaagaattaaagggttaagttaagtaagacaaactctctgctgatcagtgcctgcgagacaacagtgaaaaacaaatcagcactcattccccaggttaggaagtgcataatatgttaatgtcgactctataatatgggacttgcttgcattattaattgctaactcattactcaaaaagtgttcattctacaatactattaggcaagtgtgtttgcactgtgaagaccaagcaaaaataacctccgcaattgttgaatggtacaattagaaacacatgatttctaaattgccattatcacggccaaaaaaatgataaaaataattagttgccaacttgggaaaaaatatatatctttgccatgtcaaagagtatcaagaatactttggcagtttctggaatgcagcgtattaataattttcagaatctatcaggagcctgatgccactgagacctgccttctgacaccatagaatatgtggcttttgtctaacccacacactggacctggaagttcctaggttactaggctaagcaagtgcttaagatactgtctgttctaaaagtcaaaatggctccaaatgcttgtctatgctttttaacaatattacatttatttattttgtggtggtaacatgtatttatgaaatcttcaaagttatataggtttatttagaataacatgcaattttatttggtaaagcaagtgaattttgctcagaattctttatgctgttttttttttcttttagatgagaccaggataactcatctgtggtatgtgttacaagagtagtgtctagcgtcatacttgaaagtggagagatggtgaccatggggacagaaaagttctgggaagcagacatggactactggatttccatgaaaacaaaagtcacatccagaatacattaaattctaaaacatacatgctcaatcaacatgcgaagatactgaaaggactttgggcttattaattttatgttattcatccctagctgttcaaaagtactcattaagattgttctggtatgtagaatgtaaataaaatttatagctttatttcatatatttgaagcgctagcataatacctggaattatgacacctctccctatatgcttttaaaaataaaaatataaattagaaatatactatttaaaataaaaatgtatactgttaatatatgttgttcaaagttgttgacttttacaacattataaagctatattcacgatgaaatcttaagaaaatgagaagcactgaatagatagattttttgttgtttgttgcttttatgcttttggttttcttttgcttatctgaggacactagtaactaagattttggaaatttttttcctaaaataatttttaaacatttcttaataaaaggatatgggacataatttgagcttctcataatgactaatctttacttggcagaactcatcgtacacatttctgtgatacaacaatgctctcaggccttctgagctctgctgagttggtgattaaaacacacctggttgctgtcttattttagtcttcatatctcacctgtggcctgccttcttccctgctgtcaatcaattgcatgtttctctgaagcctgtgttcttgtctccaacagaaattcccaggatctgctattctctaaggttgtaagctatgccatcaaaagtattgagttctgaatgcatcatttcttcagttgtgtgttgagtgcttactgtttacaacatattattaggtattggctgagtaaagatgaagatgaaataagcaatgatctctaatatgaagaactcacaaacaccaggaggaagagccaaatgtgaagtacgaagtcgaacaaagacccagaggaagaagtgagtaattctttctggtctaggtcagacaaaattcacagacaaactagttgggccaccttggatatatgaatacaactattccaggtggagaagggatgaaagaaaagcattccaaacagaaatgagcaaagctgttgagcaaaagcaaatgagcagagctatcgagctgtaaacctgcatggtaggtccagggaagtcactgtggtatagcgtgattacagagtgaaggacacagagaggactgtagtgcaggcttctctcttgggagcagatgcaagcagctttccaagggtagtgatggcggaactgggccttcaactgtcagcaggagagggcataagtatgtaggtcagtgtcagattggaacaggcctgaattttaatataaatatgcaatgaaaattgcagagaaggttttaaagcagtgaagtgaggggataggatctgttttggaaatacttagcgtattgaggggaatgtactcagcaatgaggcagtggctacagaaagaccgtctagggggcctctggaacaaggcagaggggagaaagtaatgaccaagggaccggtggggaggctgaaagttgggcagacattctgagggacttcaggagatcggaggaaaggcagctgctagtgcaaacgcctagatagatggagatattggcaaaggcaaaacaggctgcaggtcatgcaatgcggccaggatgggaccagtgaatttcttatggaccattgcatctgaggtaccggagggacgtctaacagtagggacatgctggtagatgtttaacgagcggctttgctggcataacggattcctgatttataacatttgccaatttctgtggcataaataatactctcagggtagatttcatgctcccaacaagaatcttcctttaattgtgcctcttattatcttatctagttgcagtaactaaagtgtccaggagggtattacagaatagtgaaagtggtatatttacagtggtaattggaatgcttttaaattattccattaaattgtcacaaatattttaaaaaatatactcttccgtattcattttccttgttatcgctttgttgtttttgaggtggagtcttactccatctcccaggctggagtgcagtggcatgaccttgactcactgcaacctccacctgccaggtttaagcgattctcctgcctcagcttcctgagtagctagaactacaggggccggccaccacgcccagctaatttttgtatttttagtagagacagagtttcaccatgttggccaggctggtctcaaactcctgatcccaagtgatccgcctgtcttggcctcccaaagtgctaggattaccagcgtgagccactgtacccggcctcttttccttatttttgatgacatttataaagctcaatccaaaatgtgtgctaaatttttatctacgaattttaatatttatacttagttaaaatattgttttctaaaatctaccaatacacgaaatatcctgttgtttaatcattgtaatactattgaaatgaatttccatatttattgattttttcatttgctcccaaattctatgttaatatttatttagaagtttcgaatcagcatttatttatatgtgaggtttgctgtagttttctttctatatgtgttttctcaggctttcctgtgaaattcataaaactatttagaaaatttcttattggtctacatgctggaggggtttgtaaatcactggtgtcatctcatcctgcgatatcttgcataatgcatccgggccatttcttggtctcattcctttcttagggtgaatggaggatgctgaggtctcagcattgagaggaccaggcagtcactgaagtgcatacaaatgggccctacagaatctgccttttgctgctgctgaaaagcaaggttaatggaatttccgcaggaacatgagcgttaatatgatttccccatttgttccctctcctctttacgcatacatagcaaattaattaaatacttctgcagcatggctaaatccttgttattgtcatgataaaaaattaagcataataattttagtgctaattatgtatttttggcataatgtttcattccaactgaaatacccttaagcacaggagaatggccatttagtgaaagtgaaacataaaagagaacgcttttagagtcttggattatttttcaattataaatagcccataaagtgactatttgtagcacttaatatttatatataatcacacttcataatgaaagtagaaaataacaaatgacagaaatatttttatgatttttgtgatccggagtcttaaagctctgaaaagaccttagtttaaaattattagttactacttccatgtaataagcaccaattgtataccagatctcttaatttttccaacaattcctagctatatgcaacatcatttccattttgcaaaaaaggttagcatgcttaataaagttaaagaactttatcaaaaagcttctagagaatggagcagtttgctaagattgcctgtaacaaaataccacaaacagaccagcttaaagcaacaggaatttattgtctcacagttttgagggccaggagtctgaaatcaaaatgtcaggaggatcacgttccctccaaaccctgcctgtggaggacccttcttgtctctccacaccttctggaggttgttgggaatctctggtgctccttggctggaagaatcatcagtctcctccatctttacatggcctcttcctcatgtgcctctctgtctatgtgtcaagtttcccctttttataaggacactggtcatgttgaattaggacccactccaattacctcattttaacttgattaattctaaagtgatcttttttttttttttttttttttctctgagacggggtcttgctctgttacccaggctggagtgcagtggcgtgatctcagctcactgcaacctctgactcctgggttaaagcgattctcctgtcttagcctcttgagtagctgggaatacaggcgccagcatgcctggctaatttttgtattattagtagagacaggatttcaccatgttggccaggctggtctcaaactcctgaactcaagtaatccacgcatctcagcctcccaaagtgctgggcttaaaagtgtgagccaccacacccaccctgaaatgatctgtttctaaataaggtcacattctgagttattgggatttaggaatttgatgtgtgcgtttttttggaggggggcacaacttaacccataacaggaaacaagaagcaaatatgtatttgaacctggtctttcaacttcaaaacctacattttactctgctgcccatgtgttgcctttgtaatcaaaactaaaacctttccatttaacatttgaaattgttacctgcctgttcacatggctatctttcctccccaggctctaagctattttagggcagacatatcatcatatttctgatgttacccccaccttaatagataagtgtctaggacacaattccttagtaaatcttcatcatgctgaagagaaatgactctgtaaaaggaatgtggatggttatagtggtttaaatattgagactacatattataattcagtagttgaatgtttttcatacttgatgccaaagaaatgagataaaactaataaattttgggatctggaatatactggattccttgttgtatgtcactaacaaaccttagaggtgtaaacataggtgtgcctttttttataactttaatagggatggaattttaaaagcttggggaatttggaattctgagcatcctcatttagtttttcacagtgaaagagtgttactaattaattgcagaaacatcctaaaatgtagacacgtaggaacagaactcaaattggcttgagttggctataactctgtaattctgagacaggaaggtataatatgataaataaaaaggaaagagtagataaagggtgatttctaaggcaaaggataatcatgtcgattcaacaatttatctgtttattcatttgtctattgatgcattcattttcattccatccatccaaataatgctatacattgtcaatatgctaacaacaatggaaaggcctggtaagactgttctggttctgtggcttcctttggagtcctctcaaatggtggcaattgtttttgcttcatgctaatgtctactgtagactagctctggtggcacagaaaccatacattctcagtgttgcttcctaaacaatgtccctttccttacttaagtataaccagtgaagctgggtactgcgatgcatgtctgtagtcccagctactggggaggctgaggctggaggatcccttgaactcaggagttggaggccagcctaggcaacataggtagactttgtttctaaaaaacaaagcaaaacaaatgccattcttatctcatttctccatcacagaacatttcagcacctttttctctctttcagagctcctgttttccttcctggacactgacacgtctacatggatcttccattccttctttgcatggaatgatcttgcatgcagccatccactcttaaggcctgactgtaaatcttgctcttactaaactatatgaactgtaccacttgtacagcctcaaatccagagatcccacatctccccataaccagatccaccacttgaacactccctgtttgccacactgcccacagcatggcccaaccttgctcctttctctcaagggccaacttccctgtgtgttactgcaattgtaataatgaatgtagttccagtatctaaaaaacttgcttcaggaatacataagtctggaataatatatacccactgacatcaagtaagtttggttttggtaggagaacttgataggttaaaaaaaatcataggacagtatattaactattgttaagtaaaagcgggaagcacaagggagagatgcttaacccaagcttcaagattagatttagagaaggttcaaaaacgaaacctcctctctaagggtctcagggagactttctggaaaaatgatttctagactgaatcgtcaaagacaattttctattcatttctaaacaaatatagcaattttgatcattatgcaaataattttcatcatagacataatacttaaaattttatgtataacacacaagactctgttccttaacagtattttctcaccaagctataagcttttctaaaaaaaaaataattaataattaaatctctgaagtgcatatattcttcctaaatcaatgcaacattgtctttgttaactttgttgttgttatttccttttaatagtacgtttgctgtttgaacactcggtctaacttcagttcattcaaaaacagttcattttgaaaggaacaataaggaacaaacgaaatacacacatgatatggattggctgtatccccaccaaatctcaacttgaattctatctaccagaatacccacatattgtgggagggacccagggggaggtaattgaatcatgggggctgatctttcccatgctattcttctgatagcgaataagtctcacaagatctgatgggtttatcaggggtttccgcttttgtttcttcctcattttctcttgccacctccatgttagaagtgcctctttcctcccgccatgattctgaggcctcccagccatgtagaactgtaagatcaattcaacctatttttcttccctgccttgggtatgtctttttcagcagcatgaaaacagactaatacaacacacaatttttttttttctagcatttgcagctaacaaaagcagtttcctctcctcagtcaaaactttgaaataataaacttgtgatgctgattgaatgaaataataaagtgtgtaatttctaataacaatagtggtgatatattatcccatgcctttgatttctaatttgagaaatagatatcaatgtattaacttataagatccttaaaataaccctttcaaataagcaggagagatggcactctcatttcacagacctaaagtagtgtgaggtatgttgacctgaccaaggttaaatatccatccccaaatgtaaattcacccctggtcctcttgtaaacgaatgctttgaattgagtttcatctaaattttattacttgtatttttaaaaatatacttgaccagttactctatatctttctattttgcccatttgaaataaaacttatttcccaaaacaatgcaacaaaaaaagaaataaaacacagaaatgaaaatggaatatttaagaccaaaattatgtacttgagacatctgtagcatactataacacaatcagaaaaaaaatgttaaaggatattattaactcctttggaccatcatgttatatcacatgaaaaactgtagtttagcttttcttctacttcagtttaaaaagtaatgggatgactttcataggccagtcactgtgcttgccacaagagctagaaagatgagcctgcttgtcccccaaactcacagaagcttctgatgcagtgagagagacacagattaattaggtaagatttggagaatatggtgggtactaaaattatggctgctcttataataaacatcattgtcatctctaattattttaaaatatatgtgatttatttttatataaattatatataaaatagatataaggttctttagaacatttatcaatattcacaattgcatgtctttaattagatgcaaaaatcacagaaaataaaaagctagaataaatgcttcctcaaacttcccctgtatctctttacaaatcccactccaataaaaagtcaagttagataaataaagcttttgtaaaacggaattatcatagttgtagggatgaatatttacatgcctgagagctctccaatctaatttatgccacactcaccttgctcaaacacaatgatgatttggatttgctatttgaattacgaatactatgctgaattcctagcagtctaaacagctgaaaatggtgttggaggttaggggctggtgcctagatattagctctaacaggtggatgcagctctgtcatataaggtcatggaaatcactgctatcagccaggcatgaaatctgagttattttattagtgatggtggctgatggatgaccacagaataccaaactccagctacaggtgtggctgcttagttacaatgtatctgccaaaagatgcaaggaaaactccacattggttcaagattataaaaaatccactttagatacatttgtttctatattaaatcaactcaataaaaattaactatgctaggaatctagacacctaatttcctctgaaatatttacactcgttgacaataagcattaattagtgccagtgtgggtactggtactcagtttatgtttattgaagcaaaataaagctctaagtaggtggaaaatttttttcaatcacagaaataggttgagtattaaatagaacaaattgtattgtccaagcttatgaaaataaggaagaactacttttacttttgtagaagaaaaaaagaatgacttttttcctagagtcagtgaagatcttcaaaaaaacaataatttcagttgtttctaaatcaaatgttaaaccaattgttagtcttccaagaaagttacgtgtaccagaaaaattataaaatggtttaaaaatgtattaaactctttacttatttctaaagaatccacgtaacatgaactaactctacacaaagacaatgttaggattaagtaaaaagtgttagaacgtgccttccagactaaggtattaaaaaatccaacgtactgtatctgtagggagaacttaaaacttaaaacaataagaatgacaacaaaaagcacaatgattcagataggacaaaatgagattaaataattctaccccatgtgtccaagcaaggagataaactgtatactgtggtggatcatgtggcttcattactgtgtagtcaactagacagacttaaccccagaatagcatggtcaccctggaagaattttttttttttccttaaagatctgttgagaatgcaaggaggaaaatttttgataatcctaaattggagtaaattgtacctaattaagagaagacagagtggaagctcaaatttgagtggaacttctaaattatataaaccatcagtttttttttttacactaagtgcacaatatataaaattacaaaaaaaaatctcattgataagttacgtcaacgaatataaatgtatactgtactttaccacacttctgtccatctcatttaattattttagacatttggttatttgtaggaatgacatgcaaactatttcaccatcagcatggcccaggtgatagccagtcatagcaaccactaaccagctttctttaattccaaacaatggtaacaataattctcacagttcacacagtggatactgtaagccaagtatatttcctagtgtttatcacaataatgctcctacatatgcaaatgatctccaacttagagacaattaaagttacattcaaagagttttttgtaaactgctcaaagtagcataattcataagctgaacccaggtatgcatggatctgacacgcatatgctctgtccatccacctccatggaggtgttcactgtgataactagaaatgaaagtctagggttggttaccgcagaacagatcagtaggtacccaccaatggcttgtccttcccttttatactgtggagttaggactagagggtggcagtctaggtcgggctgacgttctcagcacttattgcctagctggggccatgtagctgagctgtggtcgcagaacaggagtgcaaatgtcaaatacatttccatatctggccatggaccctcctcacgtgatactctactctctctctctcccactctgacactggatttgacttccaggttgaccttaggtactctatgtagcaaatatagagatgggtagaaatggaaagttagtcatagctatagacttaataaacggtgaagtttaaagatatagctattaagaccaatatgaaagcatagctacagatggatatgttccttatttcagaaataaattcaagtgatcatcaatgccttttcttgaagtctgtttacagatataataggctaaataaatatatacatctgtttttgtatgaaaattataaatgaacacagttgattataactatttcctgatgtgctctccatcctaaagaaaacatttattcaaattcaacatcaaaccttatttgtgaaattaaatatcacagattaccaccaatgtttagataagaaattgacaaaattatttcacaaaaataggggaatggcattcttttctactcacagaaagacagagggtgtaaactcatctgctctttatgggaactaaggcgtgaggataaattgttagtaacttcagacgtaagaaatcaatctctcaatcttgacaaacttacatatctaaagaagatattctgactttaaaaggtttgcttatcgccacatttatacagactgttgaggaagctaagaaaaatattaaagtaatgtaaaaatgccttccaaaaaatttccctcttaattagatttttttttttttttttgagatgaagttttgctctcgtcacccaggctggagtgcaacggtgccatctcggctcactgcaacctccgtctcccaggttcaagcgattctcctgcctcagcctcccaagtagctgggattacaggcatgcgccaccacgcctgctaattttgtatttttagtagtgatagggtttctccatgttggtcaggctggtctcgaactcctaacctcagatgatcccccacactttggccgcccaaagtgccgggattacaggcgtgagccaccgcacctggccagattttttttaaaaagcatgagaataagacagggagtagagtgacagcgaagcaaaagtttggaagtccccttggagacagaggtggagctgtaccagggcctctctgaagtgtctgttatcatggcatttgcataacttgcattaggatagttcttcacagcctcagacccacttctacagggatcatctcatctgttcctgaatgttaagttggtaggacaggtgtgatattacagaatagacaaggagggacagagatcataaaggaacttctatggtcatacagatgataaaaggtagtattaagaattgaatactttagtagtaagagttcagtactttcctgccagccttcaacatttacagattacaaagtatggcggatgtctcatttttgcaattatttctccatacccctcatcatgcaatgaggggatcgtgatctccactcacggcattatgacttacagtgcttccctgtagctggagaaaaatatatttgccccattaactttgaccaaatgaaaagtgagtaaacttgatttatccatgtctgagcatgtctgaggttagcgtgcatctttcaccctgggttctgagtcagaagcactgtggagcagggcacagcctggaaccgtctacatagagtgtgaacaagaaggaattccttgtgaagcttatacacaggtgctggaggaacctcctcagagccagcaactgtactctctgaaagcttttatctttaccttccaaatgacatttgctagcaggcattccccaagaagaatgaatatagaaatagataaaggatgtattagcaaagttaccaattgcctttattgagataagagcctcaggaaaatctttctgctcccccagttccctaaggtgaactggcttaatgtaaaaaattaattcccttatttcatgtcttgaggcattgcctttccaccctatgtcattgaaaattgatgttgttgggagttattttagaagagaaaatctcttactaaaaaagaggaagaaaggggccctgcacaaataaggcacttcagaggtccgaagccaaaccaaatagcagataaggaagctgaaacagaagcttctactgccaggagagatccactattaatttgctggtccaagatacggaacacaggaacatgttgttgaaatatttataaggaggacagctgaaaccttatttaatatggccagagctgtccagcacatctcaggtacgcatacaataaaaccgtaaatatattaggaacatattggtcattatagtcattgagacaagatgtaaaactctttaacgtgcctacaagtaaagaaatattctataaaattcaaagaagtttgaaggcgtattttcttatcatgttagggcaagtggcaaatacttcttggcttgaaatgacttaattgtcttaagatcttcattgttgttatctacaaggaagccaccagcatctacagataactactgcagaaaaatctataataagcattgtctaaatgatgccttacaatgactggattttttagaaaggtaagctgactttatcctgtattaataaacaataaaaagaaatcttttattataattatataaataataacgctatcatataatgatatgatctaggttaaaatagattattatgtatgaatgtaactataaaaatagataaaaaagaagatattcagactatttgtaatttagtaaagactgaactatttttaataataaaatattgattctccaactgaaattctaaaaatgaactaaaagtataatttgaattctaaatatctaataagggaataaaaattatatgatgagaatagttttggcttgaattttttatggagacatagctatattaattactttaagaaaatatcagttctaattatgtgcttaaaaatactgactgcacaccaaagcaatagaagaaaattctcttttcttgaaccatgacctgctgcaaatttttcatactcctttaattttttttacatttcaatcaattccttttttgtattcaactctattttattaagaattcaatatatcattttaatttaaactcatatcaaaacattatatattaaacccacttaaaaatgtggtgaacctccattatttggaattttaaaactccattcagaatgtacaggagttagcaagtttgatcctaacaaatgttccataaataataaaggtaagtattaatcctatttaaaagataagcagtgggtaaaataaaaggaaagaaaaccagaacaaatattaagtgacctcatgatttcatttagctagctttgcaaaatagtgcgaaaacatgaaaataaaatgaatataatcacctcattcaaaagtaccttaaaatgacgtgggtttctgtcacattaaaaacagtgattttctttcacttctaaatgttggcttgtatgctaatgaaaaaatattgttagacaatttaggatgattttggtgtaccggagaagttggaatgaaacacaataatttccaatgtttgagaaagcagcacacattttaaatattgaagaatgatttttaattttaatgatttaattttaattttaatgattttaattttataagtattactctgggggatttgggatatgattgtatttgtaaatgatcactaatgtacatctatatacatttctaaattacaaattgacatgttataatctattcactataaaaagaattttatatagaaactggaaagatatgtatcagtttattgacagttgttaacttactcatcaacttagttgttatcatagacagataaacaattttttattctttttctttccacttatgtctgtattccaaatctggttttacagtggtaactctattccaaagtcctcacataatcggaaagttagcaacaagtactctacccctaagccttttaactttgattgactactacctttttcataaatagtacaaataaaggtacaatagatataagacattggtgtctatataacaggaatatgcattaaatggttatatatacaatatatatataatatattattctagtctttactcttgacaaatagcattgtgtgtgtgtgtgtgtgtgtgtgtgtgtgcgcgtgcgtaaagactaggatctccaggaaggaaggatcatcaacaagttcatgaatttgtcccgcttcatttcttctcgtggtcattagcttctgacttgattatgatcaaaatagctatcaataaatgaacgcttttatttttttctaaatctctaatttgtcaacagaatacctagcttaaaaatgttaaaaagtgaaactaaagttaaatctctgcaaatgaaatggaatcagaacatcaccaatctgtttatcctctttccaaactatgtctcctacttgggaatgatgatgatacatgggcttaatggtaacatttatgcacaaaatattgtttgcagttaattttgtaaaatttgaatatagatctacttcttcctcaatatttagttgtacctccttttttcagccaaggatctgtcagtatagtactctgatagcaaaaggtaattattgaagatttactttgactctgacggtgttcggggttcagaatcatgcttgcgcatgtcagattctttgccagagatgtaatttgttcttgtgggtctatgccagatacgagtaaggcttcctgtggtgctgtccagaacattaaagcaacaacccccatgatatctgtggctggccaccaaagtcctatctaactcctgctaagctaatgtggaacttaaaattaacctgtaccaaagtattttaaaaatcactgaaattagtattatgtcaccgtgttcacaattctcaaaaaagacagaacaacttcaaatataacttgaaattaagacagcaaccatggacacgttaactttacaaataaggcaaatactaacgttagaccgatgaagtttacctttaagaaaaaaagaagaagaagaagaagaagaaattttcacagggtgggttctcttgaagcaatgaacccaaaatgaattatctatgagcaaagagaggttgagtcctgtaaacctaattttatagataaagaattggaggaccactctgaacatagaatgagactataatggtccccagaattatcctgattatgatgattcatcttacctttatgcccgactgccaatttacctaattgaccaggaaacagagttaacagaaaaattacaattacgcaaatgataattatcttttctctaaagactttgggaggcaaaatcatgaatagtcaataaaatctaaccatgacctttcctagtatcttccttttttaaaattatcttccttataatgctttaacatatacttatacttctgtcccttgtagaatgcataaaaagaatggttgtctcatatccacgatctgtgacttgtaaatctgggaatcaatttacgctgccattgcaagctcaccggtccaatgctctcaaacactggcaggtgaaacttgatggtggacaagggttcgtgttctaattgccgtgtcaaattccagccaaatgaggctggagtagagacatttggaatgttcccgagatcaatgctgggagatggaaacatttttatgacgaggatgtgtctaagctagaccagagcagagccaatggacaaagccaggccttatgaaatatggagcccagacaccaagctgacaggaatggttggagtctatttctattttggaagcctgagaaggatgcggtggtgggaggctatatctcacgttcaaaattgatcgagctgaaatgacttgcaggattaattcacactaatactgagcttctaaaccgcaggacacataactgtcactgggcactgcactccactcagcacgccttgcaggtctaagagttggaaggagaaaatatgcttcagttagaaataaaacctaataaattaacctaagacaagggactgtgacttagagtctgtttataaatgatttctttgtggactgggaagaaaacagtcaaggaaacagggagagaaaaaaaaaaaagagttctttctgtgccagaggtgaggcttcttgcttgttcctggctccctgggctcacagtgctgctagtggctgttcttcctgctgtgattacaacatcatccgatgccaagccctttaccactcttggttctgtgtgtggctgaagacaacagcggccaatggcagcagggctgtcagctgctgaaacacagcactgttctctcaaggaccaggtaatgagggagaaccacttgaaattagcaaaacggagacaaatatgggcttaagattgcagtcaaccatgatgtgttctattcacttggatgacttctgtacataatattgtattattgatctatcctccagtttgataaagacctttttctaataaagaccttttatgaagggatagtaaattttcaaattgacataaaggggagtatcatttctccccaaatagaaaactaattttataaatccagaaataatatgacattttaattaaagtgaaatcacaaaaataactcaaaccgtgaactttctccccattatatcagtatagctttatttcattgtacatgagtagatataattcatccttttcttttggaaattgctaagatgcaagttaaattttttcatgtggcaccatatttcaggaaatccagtggtaaagtttgaaaatcgatcatttgctcttcaaccatattatttttattcattcatatgtttattcatttactcaagtaatatttattgtgtttggagcacttttttttacctgggaaagacagttaattttaaagcacgatccttgtactcaaggaactaattgatagtgtcggcaggagtgggagaggtagacaatgggcaaataaacaggtaattataagataattctgctagtgataagtagaaaatatggaaaaaataaataacaaaaaaaaatgcatttgaacgtatcagaatgttaagggttagggagtgcgggggacgggctattgattctgagacaggaataatacggagtagttgctggagaatagaaaattgcaggcaacaacttcacgtgactaagcaaaaggaaactgttgaaacagttgtgaagctagggcctgatacgacccagaaaacccagggtgtgtgccaagctggctaagacaaactggattcaacatggtgctgaatttgacctaggtttcaacaaggacctcattaaatgctcattagcatcctaaactccatgtccgccaacatcatgagagttctggcgccagccattttttggtgtaaaaatggatggcactacacttccaaaaaatttccaccttttttccagcaatcttcgtgagtattccaccccttggttaaagaaaacagtaaacgtagcagcctcaaaccgcttgagagtgactctctcttgagtaaatcctcactccctttcttgagtgtgtacttttccctttgcaataaatctctgtactttcactattttctgaatcttcctcactattttctgactcttccttgaattccttcttactgtggtgtcaagagcttggacactggctagtgttgaggtctcactgacatctggcgactttccccagcccacctgtatcaatgttattatatacagtggtcagagaaggcatcagggataatgtgagggtgtgtccttgcccagaaaagggtgttccaggtgaaggccctgggaggagatggtgcttggtgtattcgaaaccaacaacaaggtgaccagtgtccctggtgtgaagacaggaagagggaggcattagaggggaccctaggagtcttttcagggcaaagtaaagagtttgacttctactccaaaggggtggaaatccatggaagcattttgagctggagatttatgacttgatttcagtggtaaaagtctgcaccgtgggctaaggaggcccaagggcaaagtggggagatgggtgaggaggcaactaccctgacccaggtagccacggtggtggctgaccggaacatggtggagtggcagagggctcgacaaaaggatgctttctcaatctatcttgaaagtggacttgacatgatttgccagtggattgaacgtggaggaggagagacagagtgtcaagaaactgatgtattatttggagtgtttaaatgtggaatctccataagagacgccagtactgtcattaacaattattctgctccatcgtcaagataagggatgcgatggcaaagttatactacaaatgcgtcattttcgctagcaatgcccgccatacatttttaatcaccgtttattaagcaatgtcctaaagtcctctttgtgggattatgaaaattatccttcaggcatttcagaagtgaagtctgtgacgatgtgttttcttttatgagttcatatgttcaggaggctggaaaatacctagctgaatgtgtgatacacatgataagcatgctaaggcatatgggcagaagaagagattgctttctatagaacagggaactagaaaacatttgtttgttcttttaaaattaacatttaaaaatggatccaaagttaagccctgtaaaccttgtttgattaactctggaacacaatgttatactttttcctgctgaggtgctcaaaggaatgtggcatacttgaatgtagaaaaaaaaaaaaaaaacatgaaatctgaggagttgggctgaaacttgaaatcctccactttcaggttactgagttttagttttctcatcctcaagatgaaatactcgccagatgcgctggctcatgcatgtaatcccagcactttgggaggctgaggtgggcagactgcttcaactctggtgttccagaccagcctggacaagatggtgaaaccctgtatctacaaaaaaatgaaaaacttagctgggcatgctggtgtgtgcctttggtcccagctactcaggaggctgaggtgggaggattgctggagcctgggaggcagaggttgtagtgagccgagactgcgtgactgcactccagcctgggtgacagggtgagaccctgtctcagaaaaacaaaagagatgaaagctgatgatctaaagcctcattcctagctggggtattttgttatgttaattaattgattaatatatgaattcaataactcactaattagctattaaacaacactatgctttctttattgtactaaacactttatgtacaaaagtgagcagaataaacagccactgccatcacagagtatgatcttattagcaaaatggcatatttttgacatcccattcttaataggccagtgacttccaaagattttacgctgcagattgtacaggaaacattgccaattttagagcaatttaaacaagaaaacagaaaaaagtcaaagaagaaagaagcagggatgaagtactgaaacaggaacaaacaaacaaatccagattatggtgagaatatacgataaaaccaagcatcaaatgccctgagctttctgatagctctggtaaaaatttaagagagatgggatgcaggatattttcaaaaagaaggatcccctttacaaggaaattatcaggtaagtattcctatgctggctattaaactacctaattggtaattccttcaatagcttactaaacctatgggaatgaccattgctttgtgtcagggttcaggaaaaaaaaaaaacaattagatatcatttcatccaaattcttgctataaggatgctcccctacctctatttctctccttttcagggaaagggtgtcatttaaagactaataggttatgaacaccttttcttcccctgctttcttctacttcatttaaaactaggatgtaaacaagacttggggatacagatgcaagaaagagagactaaatccttcatagagatcaagtgggaagttcgtgaaactgactattggatccatgaaattgagcaatatccctctagtattaaattcaacatatcaagcactattgtaagcatgtgagtcacatcaatcatttaatctttctaatgacaccatgcagaaagtttcaaatatatgttctttttatggttaaggatttatttccaaaggggtcaggtgtcttcttcagggacaggctccagaacccaagctgagactccataaacaccactctttctatgatgccacctttataaagaataccccaggaggtatcatgtttgccgttttgtcatacatatccttcctccctgctttggtaaatatctgatggctgagttacatgtcagtacacttagaaatacctgattataaatagttgatttaattcatcccatgaattagtttgttattctttcaaaaagtaggttttatggttgtaacagctttgcaaatggttcttcatgactacactgccaattatatgttacttaatctaataacatggttgatattgcctttcacaagagttcaggatggcatgcatgcctgtgagtataaacaactgcatgtgtggcgaaaaccttatacgatttcgtttttgaatcattttaatgacatttaattgtccatgaggagttataatgacataactatgttggaaatcacattcgataaaattgtagttttaaaacttagtatctgcatcctttccttggaaaatagcagccctttttcccttagaaatgtaactaccatttttttttctttttggtctatttacaaaaacttaagaaaagtgaaagaagaccatagagaattgcctactgcactcttctccacagagataatggctgttactgtttagtaatatgttcttctagacctctctatatgggtttatagatacatctgggcgagtgtatacacagtttttaaatataaaggaaatcttacaatgggtactattcgtcaatttactcttcacttaatcctgtgttgtgaaaaccttttcataccaataaatatgaaagtttgtattattccctctttgaagactacacaaagctcacttcatggttatccgatgctgggtctaactcagctccccactggctatctggttagttcttgattgtttaatgttttaaactccactgccataaacatttctcagtgtgtaccatttcctgattgtatagttttcttcaaattgcctagatataaaacttgtggataaaactatcgcaatttattaagacccgtatatgtattgccaaattgccttcccagaagtgtttacacttcccctcacctcaccagaagatgaaactctctttctctttaacctcctataaatgtaagtcattttgttaagagaaaaagtgtgtcttgtgttcatttactgtgtgttttcatcatgactaaagatgttgtattttcaatattatttataattatatattctcatttgtgagtcatctattcaaaatgtagcaaaattactcagtgttcctctcctgctttgtacacatatgcgaatttaacctcagcttaaaatggtaattcctcaccagggtttgaagtgcctgccaccttcataatgcatcttaaaggtcagctggcaatcagtgacaaattctacattcctgaatagttacttgtgaattcaggatttcatttagcttaatttgtgtgtttttttcctcctaagtgctcaggtctgaaatagtcaaattttaaccatctaattggaatgaaaagaaagccatggttcccggcgtgtccctaggaggtgaggatagaagagtgctgggaagaggaggcacagactcttttcatgaaggaatgcatctcacactaggagcagagacctgatcggagacggtcggtggcttgaacgctgagtgctaaaaaaaactggctgcaggcacactgccttcatcacctttgttttcaacacttccgtttccagcacatgtgataaaaataaatgaagagatcccaaagctaaaacttcaaaaataccttgtttccttttttgaagttccccactttacttaggagcactttcagaattgaaaaaaaacaagaggaatggttttccaatcgtacaagtctacactggaattccaaatgattgttttcttcaggaaaataatagggaagatgccacctacctgtgtccttctcaagaactctgaggtcacatggagatgaccacaacaggcaaattgtggcctccaatatttggtgcattttaagctttctccacaccgaggaactggaggaacagtggaatgaatgtgtgcctggacctgagccatgaaccagaaaccatgaggacaagggtaaggccactcaggggacccatcagccttctccatctactcaactgccacccaaacctcacgccacatccctgccactctcagggtatggaggctggtgggtgtgtttgtgtgtgcaaatgtgtgtgtacctgcaaatctatgcacactcaacaaacagcaccagtaacaccagcctctgtctcttcctggctttgacagaatttaagagaggctaaacaagagcacaaacctgagtgaatcagagcatactagaatactttcttatgctttcctgaacatgataggcagagattttatgtactaattatgggaagagctgatgctgtgacacagggactagagatataacagtccctgcaaaactgatctcataacattagattcccaggaaaattcagtgtaagggggctagaggaacttgttttgcatttggtggctggttttccctcactttcctaggcttgtcttatagctgaatgcacacacacacaggtacacaattctaaacacgagctgattgctcttcccataagagaacaagaacaattctaattcatttaaataatgtccagttggtaagagagaaaacaatttgttgagtgtgtacaaattgttgtttgtatttaaatgacagagtgatgagccaaggcacgccatccatgctccgagtgcccattgcactagagtagacaccaccgcaggtggccatgtctacagggttgtcattctcacctccacactggcacacagagaaatcctaaagagaaattagagcttaggcaagctcatgctactcatgaactaggttagttgcctccagaaccaagtttgctgcacctgttcaccatggcctggaagagcatacttacactactagtgtggcaggctctcatcagagaccgcaactgtaagcccagcactttcacacacaatgactacagttaagtgatggctgagcaggtgcttggacttttttcaccctctttttgctaagtgacttgagcgaggtttgcctgacaacccttaatgaattatatgcaaaaaatgtcaattttccatcaaatggcagtagtaaatcattcagaagtgaaaaaaatagaagactgaattctaatttggatctttaacaaactctttctctcactgctaacatcaagaccacccagggactgggattcacatgggaaatggttcaatgatggtgttatttttgaaagcagaaggctgtctaatgccaaaaaaaaaaaaaaaagaaaacgttcctcaatcactccatcttctgtacttgaaatttagtagagatagagaagttttcttttgtattgtgaatttttattgttaggaatcttcatggaaaataaagattttacatgtcctaataaaaattttaggacaaacaccctgaaataccacatgcaaaattatgataagcaatatagagccaagatttgacagtttactggcaagccaatgtgagaacggacagagatgcaataaaaacaatgaacttttaagttctgataataataataataatagttatgcatgaaagacattgtttagaaaacaaagggcattgggggccagcaaagcaaactgcatattgaggagatggacccaagactagttcaggctacacatttgtgtttcacacctaaacggactggacacaaaggccaaaactctgtagaaaatcctgtcttgaaggtagcactcccaccattacctccatggcttgtctagtgatgatgaggttgacagaaaacagtccagatattaaggtcagaaaatccagcacctaaataagcctctaacctttgctttttatttgggccttagtaaattatgtcacctctaaactgatctctttatttttaagattcatatactaataagaattatgtaacatagcacaagcggaagtatctagaacttagaaacctagaacatagaacacaggaacaaccagaggaaagtccgctgagtatgaccacacacacacgtacacgtacacacacatacaaacgtgcgcacacacacaaacgcacacacactggatgcacgaatgcacaccattcatggaacgaacacttccttaaaatattcaattacagtggaaagactgtcacctgagataataatttagactacaatatgtctgtagaatttaaaatgcatatattcttaaaagataatcagacattatttttttaaaaatgaataatatgaaaacctaaagatataaagtattattaatattttctctagagtaaaaaattgttcaccaatctcagataattttcaaatatgttatgaattttctatgatttgtctgaaaaacagtcgtatttgtagtacaaagtaattttccctgaaatcagaattggtggacgctaatgacttcacagttattttcagatgagaaaggcttcctatttgtctcagatctacaaactgatataatctattagtacctctgtaactgcatgacacaaaataagtggggcacaagaagaggaaaaagcaactacccatttcaaatctattatcgcccttacactctccatgcaaagagaaacagaaggaaatacgtgtgtgtacccatgtgaacacaacacacctgcatagaacgtggagagcttaaggcactatgaaataatctcttcacattgggtttacgcagtatcttcccccaaacccagaaaactctcagacacccataatatacagcaatggtgtttcttcttatcttaacatatggagaaattgtgaaagaatagctcactgacttgtaaaaagtacaaccgttatttagaaatgcagaccaatttcctcattgattaggtcaaagtaatttaattgcttacaaatgtccaaattctaattttaaagtaggaaaaatattgcatatttagcaaatgtgtgagggccaataggttttcatactatgaggataaacacttcattcaaagcaaaagaggcgctatagccaaaagtcattcttaaataataaatatatttttttgtgagtgtaaggtgttatttccttataccatcttgtgcacataaactgttctgttaattttttgaaactgcctgttaggatccccaaatataaaaataaaatggaactacatttcaattaatactacttcaatacttaacacatgactatttccatcttattcctgataatctatcaaaaccttcctttttctgatatattattctttcaaaagcattcttttttcactgttttggatgaattcatagcccataactatttgtttgtacagtgcccctttcaaaacttagattaagaatctagccagaatctttttcaaattcttctgtaaaaaaccacatcaccttttcggttagataattctcaaagcaattttcggatgaaataaacttagttctacccaatagtctggagtgttcttatttcatagtgcaacttgcctaagcccaaactatttagacatcttcctataacatactccctttgttgtgataaaaataaatgaacagatcccatagctaaaacttcaaaaatacctagttttcttttttgaagttccgcactttacttaggagcactttgagaattgaaaaaaacaagaggaatggtttaccaattgtacaagtctacactggaattccaaatgaatgttttcttcaggaaaataatagggaagatgccacctacctgagtccttctcaagaactctgaggtcacatggagatgaccacaacaggcaaatcgtggcctccaatatttggtgcattttaagaacactggctatttagtctgtaagagtaaaactaactatttaaagctggttataaattatatctcctgctcactctctctaaatcacaccaaatacaaagactttctcattctctcatgccagcaatacatcagttataatactcagtaaactttggttaaatacaaaacactatagaataagatacaggatctagcaactactgacagctgacattggacatgccaacgcttgagaaagagccaacagtaaactgactttaaaagcatcttgactcatttgtcacttatccaatggtgatgatcatcattgtgtatgttttccagggatattggcataaatgcatggctacccttccttatttgtagaatccagaggaaaaaactaaagacaagaaactcattttggtcttctgggcttattcattggtttttgctgtttaatttttaaaattatagtttgttttactcttgcattggatattaataatataacagacctactaattctgattgtattgtcttttatttattccaagcagatttcttttttttacctaatagattccttaatattccataagtgatttctaacatgtttctaaaattttattaattgatgatagtttaatcttatttttataaataatagatgttaagactctatattttttcaaaatgtttttgaaacatgttttaaaattcttatgccaactaagacaagatgtatttctattatcactatctgctcttatgccactttgatttaatcaaattagtttttgcaactttatacaaatagtgaataaagaaaatataaataaaatctttaagagcgattacttgcttcaccttcttttgttggataatgtctataaactgatacagatataaccaaaaatattcaagtttaaattagaaaacggaatgtaaacagagctgattacaacctcatctaacactggactccaataaccctgtcattccatattttaaatatgcaaggtagtaggactgatattttggtaaggcaaatgccttgccagaaacagaaaggtaaacattctggtaaatcacctgtcaactagacaatgctatgaggtttctgtctggatttggcttctgattccatcatggtggcgctctccttatcgatcctgagcaatattttagaagcacctggttataaagtaagctcactggaaatactcttcccagatctccatgtggctgaagtctcattgtttaggtttcagatcaaagccctcagtgaatctgttcttcatcactccacttattacctaccccaacaccttgtttaatttcctatttggcattcctcattattagaaagtgagttatttgcttgctcatatgttaaattttttatctccctcctccatgagtatattcattggaagagaccaagaacactcacccttcttgctctcattttaccccagaacctggaccaatgcctgggacccagttcctatgcaataacacttgttaattaactttttaagatgcaatatttctttttaaaatatttatgatttggagctgcctatttggataagatttctcttggccagttttactttagagatcacttagaatatgcactatggtgacaggtcactaccacatcatgctgaattttttggtacaatctgccgaggtgccaaatgtcacatgaaaggtttctgtccttcaagaaaacaaaaccagaacccaaacctagggaccacccataagatgtgcatgtgaccaacaatttcccccatctggaaagactcatcctacccaactcaagcccagacctcataaatgtgcttcaatggcgcctcttttgtaatattgctaagctcagccatgtccctcataagcaggaaatccaggaagcccagctttgcttgacgaacacacttttgcaggatgtctgcaatggaacagtttactttgcagaaatatttctgagatttgaacagaagagcaaaggtgggcaggactcacggagtgctgttagggacctaaggcctattttatattcttggtgggaaaccaagaacaaagctcagagaataagtttttctctagctctgtgtacatatttatttcttgattcttcttatcgcctacatagccttctcctggatccaacaaatgaaggcttttgatgtttttctgagcttcagatctgaaatgaatgccttgggaaaccgttaaattattgactggatttcaatcaaacatcactctagctaaaatattagatccaaaacgtgatgcatggaccttctggttgttttcaacactgagtaaaaatgttgccacctttcagaatcttgaggaagccccaaaacatttctgacttcactgttcagagaaaacattacaggatcttccatcttaccttacttttaatgtgtggtatatgaaatacaagagtacacgtaatagaatagacagagtgggctctagccataaactcttcacaaaagaaaccacaataacaaatccatattttatttctagtaaacataacagaagcttcagtaataccagaaggagattaaaatactgcaattctatttcaaaaataatttacctatttacttctctgctcaagcattttttcccggtacgaaagccaaacaaatattaaataataaatatcctggttgaatttctctagtcttttgccctagatttaactcatgagaaagaaatgaacgtttatcacttacttttaagggtggtgggcagaatgtctacattttttcccaccaccaccaccccaaatagtttttgaaagactaattacatgttgttatgtttaaatgctgttaaataaatgcatgtaacaaaattaaagcaatatagccttctccaaataaacataattttaattaacaaagggaatgtcaatatttagcatcaagactgatgtccagttttgagtgaggatttcttttcatgaaataattaatttagtccttcaactagcggtcgtcgttgtgacagtagctagtgtagtagaagtagcaagaagaaaagcccattggactaggtaactgcaaaatgtcactaactctgagtccaaacgttttgctaagctctaatgcatcttgcattagtgttttgatgatttgctcaccagatacatccagttatattttccactctatccgtctgtgcactctgtactctagccacatgggacgtcatatttttattgaagtgccaaagatatgtcactaaaaaagacttttgaagctattgttgacctgatttaatagtatgtgttctttgttttctgaagaggaagaacttggaaaaccaggcatgtcctcacaattttggtattcatatcacatagcacatatcagttgaaataatatgttttgtttggaattaaataattccatgataaaatgaagtcattttaggacaattacagcataaatattagtactgggccaatcacaacaaaatatcaaatattaataatacatttatatttatatgctgaagaattagcatagtgttacatgaggcataattacaaatatgttcttaagcattgattttatatatgcattttataaaattagaatagtatggtgaatgaaatatttattaacacaataaatactgctataatactcacattaattaattattatcagttataggagtatacatttttccctttttaagagtaggactataaagatatgtctccattgtgtttggtgttcagaaagtagaaatttaaggtaatatggagaattatttgaaaaatcaaatagtaaataaaactaaataacaattgctctatctaaaagtctgttctcctgtaagaaatatacatgtgtatacatatgtattacacacacatatatatgtatacacataaaagctactaacatagacatcaatatttccattttaaatataaggaatttgagtttgagaaacttaaataatttgaccagagtctaaaatttgctaaataatcatagataacgctttcttctacttttatagctgaactataaaaaagttaccccaagatgataaaagacaaggaaaacatgtttcaagaaatctaaagaataaaaattgcacagagtatattttttaactgcagtagaattaaacgagaatctatagaaataagactgcttgaaaagcccaaatatatgaaatcatacaacatgcttcttaaaatgcataggacgaagataaaatcataagagaagttagaaaatattttaaactaaattactagtaaatcactataaaatgtttggcaaataaattattatatggagggaaacatagcattaactacttatttataaaaaagagagagccaaattagtgactttatattccacttaacttataagaaaaaggagactaaacccaaaataaatagaagagtgaaaataagagaaaaattgagtaaagtaaaaaaaaataggcaactggcaaataataaattaaaatgtggtctttaaaaaaatcaagaaaattggcaaactcttggctagaaagattttaaaagggaattaatacaaatcagcaatatcaaaaatgaaaaatccatttttatcatatattcgtcagacctgaagtggacttagaataataacagcagctgagtatttcttatctgaaattcttaggaccagacgtatttcagatttgggatttcttttttcgaattttggaatatatgcagacctataaataatgagaaatcctggggatgagacccaacactaaatacaaaattcatttaatttcatgtacatcttatatacataacctgaagacaattttaaacaatattttaaagtatatatgcaactcatcaaagaaggtcaggtgtggaattttccacttatgatgtcatgttggcacgaaacaattttggattttggaacatttgggatttggaattttataattagagatgctcaacctgcattaataactgtacctacacatttaaaaagcagagatcaagtggatatcttgaaaaacataattcaccaaaattgacaccagaagaaagagacaatctatacagccctaaatctagaatatacattgaattttttatttaagatttctaaaagaaaactccaggagcagatttttctgtcttaaattttatctagaaatcacatcaaaattacacagttttagaaacagaggagaaaacagttctgctcatttttttaataatttaccgtctcctgtacagtgaaatcttaaaaaggctacaaaaaagggaattacagacaaaagcccctcatgtatacagacacaaatattttaaatgaactactgtaagtcaaacccaataatatatttgaaaaatctagtgtaccttacgaccaagtaggctgtactctggaatgagaagttggattaaaatttcacaaaactaattcaatgtaattgaacatataaacagaaaaaaaggcaaaaatactaccattttaattgatgccaaaatcatatgaaaaaattacatacttattcataataaaaccctcagcaaactactaatgataggaaactttctcaagcagataaagaacatttgtgaaaaatctacaagcaacatattagtgcagttctaggcaggagacaaaatctctcatcagggaaattcagtatgaagaacgattaatttatagaagattaaacgcaaagaggggtaaagagaattaaaaaaaaaaaaaaagaatggcagacatattgacctgacattacctggaggctcaggcagagtactcaaagaagaaaaaggcaaaagaggatacttgcctggctgagattcagagctggctgaggagggaggatttagtggcccaccgggcagcaaaaatgcatgctgaggctcaacactccacacagtccagcacgagtgccagctaatgtctgtgggaccttctggcgagctacccgatggggtgacagcaaaactatggagatgattgtcactggataccctgcacaatgctgactggcacataatcagaagcagaaattagtaagaatgtctcttcctcctgctgtgtccatgcagcaccctctactgagaaagcttaacatagtggcagctggcaaacgcgacatgtgtacaaggtttggtttcggaattacaaagcagaggaaagaagagcaggtttggaaatgaagggcaatatgctaataactggtacaaaagacattgtggatgatgatgacagaattcattacatcccacctgtgcctgtgttcctcacttttaccacttccgtgcaacattgtactgaaggagctgggcatttcaatacagcacccaaaagaagaaggcacaaaagggaaagttgagctgcctctctttgcagatgacatggttgcctccataaaaatttctcatggaatctttaaaacaactactaaaattaattgaatttaggaaggtcacggaatacagattaatattttaaaaatcagttaaattcaaagttttttatatgtcacatgaaatcaggaaacacaaaagaaaaaacataaattagacttttttaagactaaaaaatgttgttaaatatataccattaaaaggataaatgttggtggaaggaattacctataatacatatttcagtcaaagaactcgaatctggaatatttagaaagctctgataactcaaagggaagacaaaagttgcagtgaagatgcgcaaaatattttaacagatacttcaccaaggaagatatctgaatgatcaataagcacataaaatactaatattattggtcatcagggaaatgcaaattcacatcaccgtaaaataacactctacactcattacaatgacgaaaactaaaaaggctgagtacactaaatatagcaaaaacatacaacaactaaaattcatccctcaggtgggaatttaaaatgggactaccagattagaaaacattttagccacttcttcaaaagtttaacataaaacatactacccacccattccactcttgaatgtttgaccacagtaattaaactattttccccacaaagacttttatgcaaataatcaaaggagctttatttctaatagctaaaaacaggggggtgaggggggaacaaatgtctattagagtgataaactaaatgtggcatagctgtatattggaattctgcttaaccataaaaaatgtaccatttttatatgaagaaatgtggatggacctcaaaatcattattctgagtgaaagaagttaggcatatacagatgtgtgtgtgtatatatatatttcatataatttggcatatataatatttcaaaaaagcaaactaattcatagtgacagaaaacagttcagtggtgtgctggcaacaaaacttagaacacaggatggatgaccggggtcacaagaaaagttttgtgggtgatagaaatattcgttagcttgatggtggtggtgttccacggttgtatataaatctcatccaatttaaaattttcaatatctgcactttattggttactaaatatacctttaaatgtgaataattgtaactaaaggactcattcatcaagctagtattcaaaatgactatctctagctcttgcgtaaagaaatctattatgtatccaaggtaaactgggctctctgtataccaaaattctaatttaggaaaccaaaatagcaggtttgcagtaaaacttggcaaatcaactactgttccaagaatgagatgacctctatttgtctaaagcccctgataacgtgcaagtacacttccggtagatcaaaccataccattgcaacacaagctatagtagggaaagggttagctagtctattgcagaagaattcttcgagctcttgtcaaatctctccattatcaaaagaaagtaaccgaaatctagaaagactcaaccagttttggggtcaacttctttggatgcctttcccaatcctctctggaattaccagcatatggcactgacaaggctgcagttgtcaatcaccttctacatcagaggttgcaagcgctgctacacaggtgcattgcctttggcctgcactggaatttaaaccggaggggatttcacatattgaagattctttgctgctgatgaacaatggaagatccacgacattggacacgcctcacatttttgcctggcaacggtgggtcggtgcccagcagcagctgctctgtttacacgggatataattctcaagctcacaagaatgtatttttctatgatctgacacctgctctgtttcgctgattcacactctctgcctgactcctgagggtattcaagtttgtgaccctagtcaagtccagaaagtgacccacacagacctcagagtccacatcacacccaccttagcctttcaaattacattcgtttccattcggggtggtgggcagagaaggcactggcattcttttttaaaattaaagtgtgctcctggtagagaacagcagttttcataacataactctttgaatggatgagtttatcatcaccttattctttattcagcgtgcttgccgcttataccatagagatcatgagaaaccgggaagaatgacagtcacattttaaaacaaagtgttccttaattggatgggtcaaactagggtgccacagatgacaagagaactatgacatgaccataccagggaaaatacgaggacgggaatctcgtacggggagatacagagacccacaggcaacctcgtctacacagcacgttctcaccttccactgtttaagcacaagtcacctgcttggaacgccagttaattttcctttactggacatagctgaaaagagtgatggaagttgaggatgtcttaaaaagtctcaatagagggtcaagtttcagtgcaaaatgtaaatgatcctttcaacttccccatgtaagaaacatgcactgcattttgaagcagtcgcctctttgagagtgccttattttaatgagtctacatttatgagcacaatcatcgtaaatactctgaatgaatccacctttgtaaagcacatatgttccacttcctccctacctgaaccatctctagtccaaagtaggacttccctgcctcccctggctctcctgtatacacgagcaaatacaaagtcacaacatatcccgtgcatttacattttagaaatatttaatctaaaaaaaaatgtgaaaacccctaaacctaagcaagcaaatataatgattatcgtatccgtaacatattcaagacaggcttggtgtatatatatatttgagaaagagtctggttctgtcgcccaggttggagtgccgtggtatgatctcagctcattccaatctctgcctcccaagttcaagctattctcatacctgagcctcccgagtagcagggactacaggtacacacccccacgcctggctaattgttgtatttttggtagagacggggtttcaccatgttggccaggctggtctcgaactcctgacctctagtgatctgcccgccttggtctcccaaagtgctgggattataggcatgagtcaccatgcttggccaaccttgatatatttttgatgggactatcacggacttgtaagaactgacattacaattggagaaaaactgccatgaaagattcatgtatagaccatgagaaacagagacactatctcctttacaaagctattttaggaagttttcagcaggccaaggttttctttagctcagttttcctcttttggctgagaggacacagcctgcatgaagcaatcccttgtgttatttctgcttcctctctgattctctcaaattgaacatacagcctgttcattgcggggggctgtgccttgaagctgggagccagccacacctttttttttaatgctactgatttctaaaggaaaaagtaacagatattggttataaagtatgtggaaggaagtagtagtccaacaatagtagtaactctgaaccttctgtttgagggtttagtgtgagatgggtgcaacatttgagcttgggaagttgtgctgaaaatcacgttgagagaaagttatctgatcttaaagcggttgtaagaaggagatcaacaagagctagactcagggcatggagccaaggaaatccagtcagggtcaggaccgcagggggcagggtgtgggagggcagggcgccagcttgattctgaggaagagctctgcagtgggcttcactccacctcttgcaaagacgtctccccatcctgacctacccttcagttcaaggatgccccaaagaaaatatatgaaggctttattcacttagatctgaaaacctgaagccctgtgcagagttctgaattctgttctagttaatactccaggttctaagacataagcaagaacgatataagcaagaagaaaatcaagtgaaatacttgccttttcgattctttattatttttagtacattcaaatataaacaaagtgcatcagatttctctgcaaagggatacgtaagtaggtgagtgtatttattgtggtaaagcaagtaattgcttcatactctaagtaatattatattccttttttaaattttgggaattaaaagtgaataactcacatattttgtatatagcattcattccctttgaacttattcagtaaacaactatacatttcaatatttcaactaatattatgcgatgaaaactcacttgtttattctgaatgtttagctactcttagaggttgaaaggataaatcagcaacagactttgctgtccagtcacttgaaatgggcaggatgggggaaagaagaaaaagtaaatcttaaacagaaaaaagtcactcagcttcaaacttgatcatccacataaagctcatttaaaatcctgaaaaatctgggaaactatttatagctctttattgcatattaatatggatggtttcccactaaactatttcaacaaactacttctgtggatttgatacctgaagaaaaaagaatagaagtaaattaacaattttactgattcttgacactttcttttctcagaaggtattaaataaaataactatttcatttccttttgaaagacaatgtaaaataattactaaagtgatttcttcatgaaatttgattatgtctactactgtggaaaactcacttccttcctgacacgatgcccaacatcacctcccattcctggtcactccagctgctccgggatgccccagcctctgctggctgcctctgccccgccaaaaaaataacagttgctcccctcagccagttccagctaacctctttaagcttcggccttgaacagaaaaataatgtaggcagacatatgaatagtataggaatagtacagacaattctagatattgctataaatcaaaggttttcacccttggcatttctgatactgtatggcagacacttctttgtcatgtgagatatcctgtccactgcaggacgatgatcagcatctctagattatacctgtcagattctaagagcaactatctccccactgtgacaattaaaaaaaaatgtctctagatactgccactgttccctgggacaaaaaaatcacccccagtggagaaaggctgatagaagcatatacatacacatatattatataccatatatatacttctgtgtgtgtgtatatatatatatatatgtacacagtatcaaatttcaactgaatgatttttaaaatttttcttgcagttctatgttaacattttcttgtagttctaaaagtgcatcttataaatgaaggaaactaattcttggtctttcatacctcttgtaaatattttaacttaatttgtcatttgccttttgagtattaagttttaggaagtccaatttttcactcatatatatatacttctatgtatgtgtgtgtgtatatatacacacatatatatacacatatatatacacatatatatacatatatatacacatatacacatatatacacatatacatatatatgtatatgtatatatacacacagtatcagtatatacacacacataaaactatacagagagagaaagagacataggataagcataaacacagatgtaattcagtgtaagaatttcaaggacagagaacacacacaggaaaaagaaaatgttaaaaaaaatgctctcctcacacatgccctgccagggacactaaaatggcctactgtttctggatgaaggcagtatttttaccttggttaaaattacactgactcatgggaagccatctaagagccctcaggtgagttagatacccttggaggagcttcccacagcctctactgaaatcactacaacctgttaaaattatatctagatcaggaatctctgagctcccaccatcatctagaaattcgttgatggtgttttattatgagtttttacacgccttttattaaaagagaataaaaccttggaagaaaatggacactctgatactgtgtttattcttaaatgaaacatatatgtgagagatcttctcagatccgcaaataaaatgtcattgtttttaatggtaatttgtattgtagagctaatataatttacttaactagtgagagttattgatagtctacatttatatacttagacatgtttgaattttcaaacattatcaaaatgaaacaaaaagcattcctttacatttattttgtcatatttgaatgcatatttgtagaatacattcttagctagaatttctgaatgaaaagtttgtactttattttgagaaaaatttcaaaatatctatacaaaaatgttgcagcaatttaatatcctaccaatagacatgaaaacatgttttcaatatcctcaaaaacgctgttactaaaatgtgaaggtatgcccattcagaatggcgagctatcatactgcattgttttaacttggttcgaatatacttactggcacaaatgtattgtatttggactccttacgtatattttacctgcttttcaattgaaggattatttaaaattttcttgtagctctagaagtgcatcttacaaattaagagaaacaattctttgtctttcatacttattagaaatattttaacttgtcgtttgccttttgaatgttaagttttaggaagtccaatttttcattcagttttatatgtgatttctaaattacgtgtcctgcctagaaagacacttagacaatatttatcatttttattttccatattaatatttacattggtgatctaacatatttattttgctacaaacagcaaagactagatttactattgtataaaacagtgtcaacattcagattttcatgaccaaatcaagaagatatctttgtctgctaataatagtgtcatgttgcaaactatgtggctgtctgcttgttcttctgttccctttgtgtaaatctgaatgcttttccttaggctttaactttctaagaggaatatcccaggaagctccttctctctagccaaccgcaatatttgaatacttttccacacacctgtatttacaaatgcctaaaatacttctctgcccatattagtatggttttgctgctttttaaaaaaagccaagatatggaagtgaaccatccgtttttagctaccgcaaaacacaccaccacagcatgaggaggtagttgtctgaattcacatgcctgtcaaaacttcctcatagtattgcaaacataattattatctctcttacatgttttcttattttatcacagaatttctaattactagtcattttatcctttttcttaacaaataagcacacagcaaatacacacacacacacacacacacacacacacacacacacactctcacagttgttgtcaactaaggctgcataataatatcacttagggaaggagagaattaggtataaccatgatgagagcccaatctcacccttgaatctctgaattaattggtcttctccttctctctagacaactgcaaatactcaaaaacaaaacaaaacaaaaacgaaaaacaaacaaaaaacaaaaacaaaaatactcaaacttaaccagtaatgattgagcttacctaggggtcactaatttaaagcatatgttgacaagagcaatttgaaagatacattgaggaaaattacattttatttcatcatcctaaaatctgtaggtagaatagtgacaaaatcacctaattatgggaacattataggtttatctgagtggaccaaacacctctgctgtccacctctggtgccctcactaaggtacaataacctgttgaaccaggtttctaagcattgatgggtttctgtgatgtgtcatctgtgctccagttaagaagtcacctctgtgtgacaagctcttccactgctacttccctggaactatccaggccctggttctgggatcctccctcaccctgtgctggtcatatttgctggtcactgtcccagtcctgactgcacggctgccccagtgccatcaataagaagtcaaaacatgtgtggtgttcatatgaggctggtgtccctataaaagctttgacagtggcttcaccctctgattatcaatcttaaccagacatcactcactagccaagctaaaaataaaatgaaggccaggtgcggtggctcacacctgtaatcccagcactttgggaggccgaggcgggtggatcacgaggtcaggagttctagaccagcctggccaatatggtgaaaccctgtctctattaaaaaatacaaaaattagccaggagtggtggcatgtgcctgtagtcccagctacttgggaggctgaggcaggagaatcgctggaacctgggaggcagaggttgcagtgagctgagatcctgccaccacgctccagcctgggagacagggcaagattcagtctcaagacaataaaataaaataaaatgataccttggtttgtttttttttttttttaatcagtccattgatctgtgaatggctcccttaggaccttgtagcaactatggagacagaaaagcagaatttaggcaatgctaggtctctagtctaatatgatcctaatgtaattgagaccctttctttagccctcatatgtctataagttctaaatatcaccagatatattttatgttaggtaggttttgtcatggtgtgtaacctaactatccacaataaaactgtttttaaaaatatttaatgcattcaaaagcattattactgtttaagaaaactggaaaacctattctattttaacaacacttattcatgattttctgattttaatggccctatcacattcacctctaacctcttcattatcagcattgcagaaaattaggggtaatcttgttaaagttagaaagaccgacgaactcgagataaatgccaaagctatttccctaggccttgtattttacaataatcatgaattaatatatcctgattttctatattgagtggtaaaatctcccttcatagattcgcctttattcactttctgactttctaaggagtttctcttagacctttgatataataattttatcacagttggaaatagatgtcaacgtcaattgtttctgatttgggacaagtaaataaaacttcaaatttagaaaacatgtaccaattatcagtcaccacatgggatggttgactcacattcatttaggagagagttacattaagtcacgttgggttccgtgcacagtggcagggatgagttgccctgaatcaggaataatgtaattcaaaattgccccacgaacacttattgacgatgtgaaagtcaacatatcttccagcactttgggaggccgaggtgggcagatcacctgaggtcaggagttctagaccagcctggccaacatggtgaaaccccgtctctactaaaaataaaaaaattagccaggtgtggtggtgcaccctgtaatcccagttactcaggaggctgagacagcagaattgcttaaaccggagaggaggagattgcagtgagccaatatagtaccattgcactccagcctgggtgacaagagcaaaactccatcatgggggtagggggagcagggaaaaactcaagacgttggtaatcacaggagaagacacattcagggcacatttcttagcctcagaggattatgttctattagacatctgaatgtacaaagatatacaagccccgagccccattgcgaggtaacttcagggcaggtgtgagttcaaaggagtacaggcttccaattgcagtaggtggccagtgttacaggagttcatgcacacaaagaaaatgtacgtgggttgttgtttggaatgcctagggaagatttcctgaaataaatataatgtgcactgcgttttgaaagacgcatactattcagaccggtagagggagaggccgggaataagaggacaacattctcttgtaaggtcaggtcaaggagtaacccacagatctgtgcaactgaacaaggatacttttcaggggacaaacgggagggactgaaggacagaatgcagtttggagtccgatcatggactttcttgaatttcagggtcatgggtactagaactgtttatgttgccggagatagaagccagggctaggacagcagcagatgtgtcagtgttcccgagaggggagcctggggcaggaaaggatcgtgcattggtctatgtgaacgctcaggacagcctgtgccaggacaggagccttcgtaggaacatttactattaggatcaaaaacaggctgtggttaatggaaaggtgtttttttatgtgttcgtttgtttctttgtttttttttgatggagtttcagtctgtcccccaggctggagtgcagtggtgcgatctcggctcactgaaagctccgcctccccagttcacaccagtctcctgcctcaccctccctagtagctgggactacaggcgcccaccaccacgcccagctaatttttttttgtatttttagtagagatggggtttcaccgtgttagccaggatggtctcgatctactgacctcgtgatccaactgcctcggcctcccaaagtgctgggattacaggtaagagccgccatgccaggcctacttcctttttcttttgttttgtttgagatgaagtctacctctgtcacccaggctggagtgcagtggcatgatctgcactcactgcaacctccatttcccaggttcaagtgattctcctgcctcagcctcccgagtagctggacttacagatgcctgccaccatgtccagctaattttttttgtacttttagtggagacggggtttcatcatattggccaaggatggtctcaaactcctgacctcaggtgatccacccgccttagcctcccaaattgctgggattacaggcatgagccaccatgcttagcccaagacatgttaaaaaataagcattttgggatttggtgactgcatggttggaccttactggagactgggaagcaagaggaaatgcagagtcaataaagttcagctgtttaaaacagcaaccacctgacaggtcattaaaaaaaaaaaaaacaatgaagagatgctttaattctaaataacacaaagatcagatttttcattttgaattttgagtccaaatttcttccctgtgcttaccaagagaggtctcatttcagctctcaatatccacatcattaaaatttagtttattgatgggtgcccaaatcatatatgtattgttggtgtgtttgtactaaagaaataatccaagatgataatataaaggatatattaattttttaactctaaatgtttttacatatgtaaataatactatatttctgactaaagttccagttacaaggtaagcatcaataattctaaagtatatattctgttttgtcagctggggattaaatctgcctcttaagtttatttcgaaaaaaaatattacagtggttatgtgaaagaaatttattgatactaaaaatgctcaagttgtttaacagaaaaactgttttggtatttcagttaatgcacattttaaacttctaaaaatagcttttgtgcaacaataaaacaacaacacaccaagacagctctaagcaataacttttgtgacatctcagttatcagcagctcctacatcaatcctcccacaaaagaatccgtcctttgaattctagagctgccttaagggttgctacttaattgcgtttgagaaataaacaactgtttcaaggcataatgggaaacgaatagcattagagtgctccctttcccgattaattagaatttgctactatttataactactttccccatcaactcatcctgaatgttgaaagagaaaacacctcctcatgtgttttccctgacaacacacccattccaatttcacatctctatttatttcaccttttgtaatagtagagacctgtaacactcagtagtcattgggcgtttttccgatttgtattacagtactctaaacggttcccaaagaaatcactctgcactcctcgaacgtctcctcaaaatggcattctacgtatgcggataggaggaagaaatataaaatggaatatcaagatgaaagcaacatcctaactctaaggacaataaacaagtagaaatatgacatatttttctctatttcaaacaaaaaattgtcggtaactgagtgattcatatgaacctaagtaggctctttcttatcaacctcccttgcttcctgtactaaacataacccagcaagtaaaagaaaaaaacattctgttgtacatacaactcacaataaagctctctgaggcacaggtatcaatttatttactgttcactcaaactccaaaatgaaatatgtttctaattgttctaacttaatatttccgctgtcgatcctgttataatattgaagatggtaagaatgttgttttatatttattaatataaaatgatcataatagtaccataagaccataagagataatacattattgaaagacatacctgtcagtcaaattaagacaggttttctatatatgaaagaactagagtaaataaaaatattgagagaaagaaaatggaaacatttttaagagagcatatttttaacaagcattttttaatggaaaggtaaagtcataattttaacgtagagtcacacacattggcatttgaataaaatggattgtctaattcttttttctgtaactctgcagtttttattaccattataatacactactataccctagtagcgttgataattgacaacaaaaaaagtaactggcttttaaagagcataaattatttaagaaagcctacatcaaattagcaagtattgtatatgtagatactttgttcaaatactaacacataagaccataaatgtaataaaaggacagaggaaagcttacctgtttcagaaaagagacggccattctactatgtatgaaaggtaaacatgctactaaaaacagataatagatattgtagatgactcagaaaaaaaactaggtgtttgaaagtgggtgaaaaaatgcaaataaaatatatttgaaaatatattaatgaatatattttatatttaacctattagttatgtagcatatattgacatattataaactagatgtacacataaaattgtgttttctgtagagatttttttctcatcccataaaataataaatgaagcatatgattcttgtgtgtattactgttggcattaacatcagtaatctatataagttaattttgttaggaaaatctgatttctttggaagggatattccttcttcctttgccaaattgaaaacaaaaagtagatacagacgtacaggtataattttttcttgttgacaattgaaaaaatataatttaaaaatgataccaggaaatgttttgctttcttcattgtaaaaactatagatcaaaagagaaaacaaattacgaatagattgtaccattattgtctaaaccacaaattctccaaagaatgcaatagccctgaatgttgttccctcacccacctcctatgttcctttcactgaatatattctctgacaacataagggttcattttgttctgattagctgaattgtactcaagaatttatctttgttctttttctctcaaactcacagttgcttaaaaacaatggtgtattataattttatttaaattaccttgacaactctgtttcacagatcttgaacaatatatctataaacaaagtcagtgataactttcaataaaaagttaaatttttaagtatagaaaaagtatgcacaatttgccacaagttgatagacttcaagttttctgtatagtaactgtatttttcttttctggtaatgaggggtgaagccagctggacttcttgcattgagtggggacttggagaacttttctgtcttacaagaggattgtaaaatgcaccaatcagcactctgtaaaacacaccaatcagcgctctgtaaaatgcaccaatcagcgctctataaaacacaccaatcagcaggatcgtaaaagtagccaatcacacggaggactgaaaaaagggcattcctataggacagaaatggaacatgggaggggacaaataagggcacaaaagcagcccaacgggttggtctcccttgctgtgctgtggaaactttattcgctcttagcaataaaccttgctaccactaactctttgtttccctgccatctttaagagctggaaaactcaccccaaaggtctgtggcttcattcttgaagtcagcgaggccacgaacccaccggaaggaaccaactccggacacaataataaaatttaaatattccaactagatttcataatctgtgtattcaaacagtgctaactgtaatataaaaagttgataccttacctcacttttaaattcccttgttgaggctgtccatcgtaaactgataaaatatcaaaatcttcttcaagagcaaaggtatggaaggacaactgtatcctattgcgctcgcccgtgatgatgatccaggtgcagttggcatagttcggatacccgtgaggaaaccctgggctctcaatagtgccattgggaccctggactaagcctccacagttctgacctggaagagaaaacacacacaaaaaagcatattattctggccatctttaatctgtgatttaaaaaatttctaaacactttagccaatttttttttttttttttttttttttttttttttttttgagacggagtctcgctctgtcgcccaggccggactgcggactgcagtggcgcgatctcagctcactgcaagctccgcttcccgggttcacgccattctcctgcctcagcctcccgagtaggtgggactacaggcgcccgccaccgcgcccggctaattttttgtatttttagtagagacggggtttcaccttgttagccaggatggtctcgatctcctgacctcatgatccacccgccccggcctcccaaagtgctgggattacaggcgtgagccaccgcgcccggcctagccaatttttacaacattttataattcttgcacaaatattgaaggataaattaagtgttctgcagtgctgaaagatagaggacaacaacaaattaaaagaaaatatgcaacattttgtaactaatattagaagtttagggaagttctttatcctgtcactttaaaatacagcctcatcaatatcaaatttcagttcatgggggaacaaatttggtgctatctacatagtatcatgcttaaaacactccaccctaaattctttgttggtggaaactaagttacagaagaataaacattataaaactatatacatacacacctagccacataactgcaatatgtggtaataagaatagttagaaaaaaacaaggtcaatacgccagtgattgatcggtgcctgtgctggcaaatgtcttactgggcagaagaataacatatgcataaaggaagcttatcaagttgaaaataaaagacataaaacaaggtaagttaaatgacgctaaaatgaaagagcagctcagcaaaacgaggactgtaacaacatcctcactattgatgtctacccgttcacacaggcaggacttaggaggtggagcagaaaggaaggtgtaccacaaaatgaggggaccaagtaaagaaaaggctcagagttccaaagagcagtaagtaagcagtaagtgaattagcttagtccctaagcaggacagcaggacatctcacgttttactcagccctcccttaagaacttccctttggcaggtggaattgggatcaccctgagggtttaggattgacatgacaatgggaaatgatgagggctgaagggcaattgagtgccacaaagccaccttgaagccactgagcagtgtctgaggaactgatttcattctgcctctgcctctgaagattttgtgttattgattctaacaaagcacttctcaggtgactcccagactgctggagtagtttgaaagaatagaacccttgagtaaattgtaggccccaggcttcctgcaagaaccaagcgctgaaagaacagctctgggagattagtaacagctgcacacctgacccacctattctatttttaccactagacaaactgaaatgcctgccttgtcagcctcaccgatgcatttcatttccgctactcctgatcttcatccacctactttgcagggtgattccctacttgcctgtttcagcccttccccttcccaagttacttcccacatacaagctctccgtgccatgctaatttggtccctgtggttgtcaattttttttttttttttttggtctgttcagttacctgtaacagtctgcctctgatggccatgcctgggccaatccaactgaagcaagaggagccaaagctgaaaacggggcagacagatcgttggaagtgtgctctcataaacacactctgctcatgtaccctgtaaatattactatcctgtaagggaataggataacccactcaaacccttccaacatttcgtttgtctgaggttagctgttaagtagctcgcaaaaactgtctatgtttcttaccttcttaatatgcccatttcccactaatgtgctttaaatgtatttaaatgttttgacactaaaaatattgagaaagttttgaagggacctgggtgtactcagattgtggcatgtagtgtaagtacttgaatacaagtattatctcagctcttattgttaaagtacaaatagaaaattattttcaactacattttatacttaaaaagtattttacaacagtagacctcagtgagctcaaatcattcacagtaatattatcaaatgcttgtgggagttggcaaaatcttaataaaaagatttaatgaaagggatttatgagtttaaaaccagagaactaataaaaagcccattttccactaaatttaagtccaataataacactgtaacaagtaaatattaaagctgtggggttttgaaaggtttttaaagaaaatagcttgtctgctttacgagtaattcttgcttaacagtaaatcaaaaaaagggaagacttgattataaattggaaaaaagaaaaatcagttcaacagaaaaacgtcaactggaaagtagttactgttatagacccatcaggttgaatcagatgaacagatatgaagatttcctcaaggaataacatttaggctgcattcagggtactaatgagtacagtgcatgttgctgaatgagtcacatttgatccattcattgacattccatagcaccggttagaaattttggcaactgctcaaaagttcttagcagaatgaatatcatcgttggctgtccagtgcaaacaaccaagaagtttttaaagtatctatgcctaagatagaatcggatgtatttggtctgcaacttaatactgcatcttattataaagccaccgtgattaaagcagtgtttgattggtgtaagcctaaatagccagtggaacagaatagaaagccataaaatccacaaagatatagaatctagatttaaagctaatatggtagtcctcttttctcttggatcttatactctaatgggcccttgcctactatagagtatgcacaaatattctatacatgttttctttgtaaacgatgtacatctaagcttaatgtaaatgatgtccttaagtacagcttcaaacaagtggattattttaattgaatattcttaatggacaacttttaaatgctgcaaacataaccatatttcaacatgttgtttaacatgaatcccttgtaagtacctttgtaatttgtatttcttcagggcaataaaataatcggtagtttctgtgataattgtaatgttttagttaaaattaagatgttattttacagggattgaaaccttaattattgctaaaaaaaaaaaaaaaaaagtctaatggtcttcttcctccataaactgacaccggaagtcaccctgaaataaaatatcaatatcaatggcaatatcaatggtaaaaaagaagtatatatatatgtatgtgtatatttttcctagtgatactgaagtttgatttcaatttcaatttcgatttcaatttcatatatatatatatgaacacactctgtgatgtgtattttggtatgcatgcaattacacatataccaaaatacacatctgtaattgcatggataccaaaatacacatcacagagaaacatacatgcaacattgtgcatacagatgtttttgctgctataattcaaacaaacttccaagagaaaacctgaacacatgccataattttaggcaactggaatctaaatcatctgttaccgaaataataatatacgaaacatctggctcctatctaaagtaatcagcagaatgttagatatagaagaatcagagagttagtttttttgcagatttctactccttagataagtccttaataccacaaccttccatacacagagttaacttcagtcatttttaaattctgtcttatactgttggactgaggttctgttttcaaactacattttcacatatactctttgttgaccgtctaagtagccacacatcatgatttttacaaggatggaagaacaagtgaaaatgaagtaagttgtccaaagtcttctgggaatgaatcaaggtcttctgacaccaaagcctagagccgtcccaccaaacccagttatatctccacgaacaaacacagcaggcaacccagtgcattacagacctcatgtatggtgatcgagtcataacatatatcacaataaataccttagatcacaaaataaaatggtgagtaaatacagacattcggaaaatctagatatgtagggactctaaattctgtcgttctttaaaactaatcaatgcccattgaaggaaaaaaaagtgaaagtattaagtagcaattggaaacataaacatcactcatagtcttattaccaaagataattattgctaacattttgctgaacacttttctaatctacagttaatgttgcaatactacctggcatgcaagatgtgaacaatttggatttggattaaatacttgccagtcctgcaggaaccagtaagaactgacctacgaagtgccttgctttggaggtgacctggtcagcctgtaggtgctactctctatcctgtgaaggtccaggtctgcaagatgggcaagtgctcggcaaggagcctataggactacttgttcggggccccggtgagccatggagttgatggttggttatacagcagtgcccctcttggaggccggaaaacacattccagtaaaggcagggctcactgtgtcctatgacaattttctactttgaaagcctgtctcagaaacacccagcttagaaaatggccctgtgccctcatcatttctgagatgaactaacccctccactctgaacacccccctacagttggttggctcctctcccgggctgttgctctgtaattcgtgctgctgtatagcagtggcacatacttttcctagaaagtagcagctgagatgattcatctgtgatccaaactgattcactgtgagcatttgaggagtgaaggtatcataaacaaacgccttcctagattctacacctggatgaaactgtgctgtttctctcagtcctgggctgggtgggcattctcagaaagtagtagaggtggacataatatttaaaaactggtgtgccaaatatgttctactacctcatttaattcgtgcacagcctttgaagtggggtgtgtagcttagcctttgctttgctagctgtgaaaataattacttgggtaatgctttatgatgagggaatggttttgctattcaaaacctctgtctgagagcaaatgtttggacatcaaagatattttgacatgtaattgggtttagggacttagaaagatgtggactatactgttctgtatgtggagacagccatgcagggaaatgatactctgtagcaaattctacaaacgaggaaacgagtcatttgagaaatgatggacaggactgcagaggaacagtctggagatgaaaagacttgggaatgtataattgtctccaactctggggcctgatatcatttgaaagcgtatatagatttgtgtgtaaatagagtccaggcagaagccatattatcatctgaacagtatgtctcattggagataaacatcaaaaacagcctttgtggtttttatcccgtttgcaaaaagcccagatcaccacactggctcctttctaaaacaacatcattggtggaaaaataaaccttacatatttattacactcaggggcagtgtcgatccttttactacatctattttgtgaaaatgacaatttatggttttcatgtctatataaattactgtgtaaacgagaacttgattactttctgacaggcagatttttgacctccaaagcatctttcatttttgacatttttgtagtcaatttctattgtatacctgttggcttttctggaacactaaacattgccttactcctactggacgtagctatcaagcaactctcaagtaaaaaacataaaataaagaaaaaataaaataatataaaataaaatggtccattgcgattttcagtgaatttttttatttaagagctaaggagtacgacagacttctaagtggctctggaatttgaaatagtgagaggcctcagatttcaatgaaggaagtggaagtttccctgatcagataagcgctgtttgaaacggtaaacaaatcaaatatgcattaaattctgcattatcttctacagtttcaggggttattccagggtctgcattatggggaaaataattaattgtggaaggaccatgatttaaagtgccgttccggggacttcgattaagggttttcagaattaaagtcttcaggcattttgcaggaacaccatgccctgtaggaggctttgaaagcctgatgattctcagatcacctggagctactgacatcagccactctggctcagcgccctagggtacttggttgggttttactcccaaacacttatgggagattactcactacatgagcaaagaagaaaagtaaaaatgccagaggcagcctgcctgaaagagagccaaggaatcgatttctcactgtggagtctttgcccatgagcaaggccttgaagggagctcttacactcaaaatgaaccaggagtacccggtttgtatcactccaaaaggaaaagggaggttttcactggtcagtgtcacttctttcccttccttgaacacaccacgcttgttcccaccccaggccctttgaacatgtgggtccagctacccgaaatgagctttgcccagattttttcattgaggcctcatgcaggtctcactcaatgcagtatactctttccagacactcatatctcaatcagcaacattcttccaacattacatgctaccctttgccctatttttttttgagacagagtctctctctgtcaccaggctagagtgcagcggcgctatcttagctcactgcagcctccacctcccaggttcaagtgatcctcccgcctcaacctccagagtagctgggattacaggcacgcgccaccacacctgactaatatttctatttttagtagagacagggttgttcaccgtgttgcccaggctgggcaggaacctctgacctcaggtgatggcctcgcctcagcctcccaaagtactggaattacaggtgtgagccaccatgcctggcgcctacactattgtattcccttatagcatttataactttgtgaaatatcctatttacttgcttacgcattgatgatctctttctacactaaaatgtaaaccttccaagagtgaagataatgattggcttgtttatatgcccatttctagaatagtgcctgctagttgacattcaattgttgaagcctgtgggtgagtttgagtgcatgtgtgggaggtagaggtggtcggacaaattaaatctctgtgcacactcatagggaagcagggaaagcagtggtacttgaaagaactataaatctatattctggttagtgattacttaaaacattaggatgcaggtgatattttaattccaaaagcagagttgctattctctcaaccctgttcagcagcctgattgtcgaaagctccttaaatactccctgctttatgggaagctaatttttctcctacatgctgttcctatggacgttggcatctctgctttttccttctagacaggggtcatcattccgggcaagacaaggctgccatgagtcagaactggaacctcacggatatgatgtcaatgttgttccctctgctgttgcccccaggggaggcagctttagttaactccagcaatgtaatgttttcacctactgagaaattgttgcattaatggtaataaagtcattcagtgtgtacccactctgaaaagacaaattgccaagacagcaggtgtagtgcaggggcaaaaaaaaaaaaaaaaaaaaaaaggcaagcaaagcactgggcttcggatcaaacaaatctaaaatatgattaatttgctgcatggagcattaagccttgaacatattgcctcatggatatgagccccagtttccacaggtgcgggatgacgaggctgcccattttgcaaagtaattgtagactggcaaaaagagatgtcgaaggtaggaagcaggggtagacacagaaaagaaaaaagatgattattgtcatttttacaaaggaatatttagctagagggcctcctaattgcaagagaattttacgtgaaagatgatgagtgggatttgccctgtgcctgcctttaccctgttgtcctttagattccgggacacatcattcttcacagggaggcttcatggcaccccacgcctgcatgtgctcctccgctcactgtacttaaacattgtacttaaaatatgaggatttcaaggccatgtaacacgactttagagattctgagtgataaagtcggttatattcctcagccaatcaaatcaaaaacaacaagcactgttttattcacgattcccagatctcacatcgatgttttggaaataaacgatttttttgcctgaaacaggtgacaatctaaacctgagtcttcgcttcagagacttcgagcttatatttcaataatgcaagttattctgaagtcaatgctacttttcttatagaaacatagcacccattgccagtggagagaattctcttcctctatgcatggtagaactaatctttttattatatttattttttcttagaactaataattagttgtatgtcaggtatttatttatctcttaatgaaattcccagtgatgacacttcatcttgggtcagtaggattgagttgttccctacatttgaaatcatgctatgtattactcttgctttaatacgggtgaagccagaagctccagtgtctcaaggttgtggcagtgaatgaatgtagtaaaatgtttccctaagtagtgcatttaaactctgagatgtaaattgatgtagtttaattgggatactataggatggattcagcattactcactaaaaaaggtgtaaaactaccagttgcctgattcctgggtgttcgcatatacaaattctttctgtgtagatatatgagtgccatagttgtctttcctcaacaatgaagaaagatttctgcgtcaacaaggcatattttaaaattgtaataccatgctctattttaatgcttagtagagttcacctccaaagagaaattgaaatgttaaaaagtcatactaaaacccctagatctatgattatacctgaaggttgaagctaatacaagctctctaagaggacagacagtaaagaagaatataatgagggttttttgttatgaaaattatacagatatggagacctgaatcatgacaaattatgagcagatttttttaacctcatcaaaattagtacacacatttttaaaaagagatataaatgtccaacacattttctctctcccgggatgtggacctagtcatagactaacagccaaggtgctgacacggccctcctctaggccatccaaagtgaggccaagatggcagcaaagtcagttcttaaggggtgttttataagtttaatatgaagaaattgatctccaacaagtcaaatttaaatgtataaaaatcacaaatgggttcatatccatctctttggacaaataggccactgggccatacgtaacttcagagtgtttcgggcgccagtttgctgtttctatttttttttttttttaatttcttctaaaaaaaaaaatccgggatacatgtgcacaaactgcaggtttgttacataggtatacatgtgccacggcggcctgctacgtaggtacgcgtgtgccacggcggcctgctacgtaggtacgcgtgtgccacggaggtctgttaggtaggtacgcgtgtgccacggcggcctgctacgtaggtatgcgtgtgccacggcggcctgctacgtaggtacgcgtgtgccatggtggtttgttacgtaggtacgcgtgtgccatggttgtttgctgcacctattgacccctcctctaagttccctcccctcatcccccaccccccaatatgtcctggtgtgtgttgttcccctctctgtatctatgtgttctcattgttcagctcccacttgtgagttagaatatgtggtgtttggttttctgttcttgtgttggtttgctgaggatgaagcttccagcttcatccatgtccctgcaaaggacatgatctcattcctttcttatggctgcatagtattccatggtgtgtatgtactggattttcttttttccagtctatcactgatgggcgtttgggttggttccaagtctttgctattgtaaatagtactgcagtagacatacatgtgcatgtgtctttatagtagaacgatttatattcctttgggtatatacccagtaatgggattgctggtcaaatggtatttctggttctagatccttgaggaactgccacactgtcttcctcagttgttgaactaatttccattcccaccaacagtggaaaagtgtttctatttctccacagtctcacaagcatctgttgtttccttactttttaataattgccattctgactggcatgagatggcatctcactgtggttttgatttgcgtttctctgattatcagtgatgttgagctttctttcttatgtttgttggacacataaatgtcttcttttgagaagtgtctgttcatatcctttgcccactttttgatggggttgttttttcttgctaatttcttgtagttttttgtttatcttgttcctgcttccccacctgtgagtcacttaggatataatgacatgatccacattctctgtgatctacgggattgtctgtcaccaagtggcccctaatggtgcctcagccatgagtcttggggctcagtccacaccacaagggcatgaaatagatcttcctcacacacacaccatgcatgcatgcacacaaacacacacacacatgcctgctttctccctctcttagggaaatagtgctataacttatatttgggtttagtgtctatctgcacaaaaaatgtgatttttttttgcacagtggctgcatggataaaatcatgatgcatatcaccatttacgttgctcatttcacagacaaccatgtttcaccttttactggatttttaacatttacagttgtgcttttcctcagtgtctttgtgaatttaggaagagaatttgtggggatgagggctactccattatgttggagttgagacatcagatgccggctgatgccaccccaccacttgtctggtaaaatgtgtgtttatagttggtcgggaagtatgcacacccaccacagtaacaacgtcacaaaggataagagtgtgcttccgcatatacgtaaatcaatttcagtctgcaatgaagccagcacttccttagtactgacacctagtatcctagggccctggagtagtgccttcaataaacatatctatactgcggttatatattctctttggccgagaaactcttcttgtaggcttcagttggtatatttgccaaggtgctcaaaataagtgagtcatcattgatacacctgtcattatatgatctaaccttctcaagaagatagtaatgctctagactggcagccatgaaggcagatacctttattataatctactgactgctatattccaagtgccaagcacagtgcccagtgcacagtaaacatttggtctatggaagcaagggagctggagtgactattgtatctgataaaagatattattactacctacagtaatgattgtgaacattgacagagtacctattataaggtaaatagtttccatattttaatcatcacaaatgatcttgaaagacaggcattatcattcctattttactgatgagaaaaactaaagagcttgagtgattttttccaaagccacatatacaaagcaaagaaatgaggggtataaacccacgtgagtaggacttctacccctgtgctcatcctatcctgacacaatttagaaatgatatagtattttttctgtcattttctgaaaagaatgtgtctacaaattccactacaaaagcaaaggccaattttttaattttaagaactcttctactcctctttataagaagccatgaaactacattaattggaaaaaaaattaaacgtttttgtgtatctgagccgaaggctaaattctgtttctttgtctctatttgtgtaggcatttcagaaactaataatgatgtttatctttagttttatttcataagtaactattctgacctgatactacaatatgagttatgcctttaacaaataaaagaggtttggaatttcaataatatttgcaggtgtatgactgggggcaccatgtgttgatgcacaggttgtgcactgcacaactccacagagtgtcgttcacacagatgacacagctgccttgaacataagactgtcgagaacttgattgatattagaatttatcatgtctgggatgagacagctttacgtgtgaatatgtagaagacaccaaatagtcataaaaatatcaatgaccagcactttgggaggccgaggcgggcggatcacgaggtcaggagatcgagaccatcctggctaacacggtgaaaccccgtctctaataaaaatccaaaaaattagccgggtgtggtggcgggcgcctgtagtcccagctactcgggaggctgaggcaggagaatggcgtgaacccgggaggcggagcttgcagtgagcctagatggtgccactgcactccagcctgggcagcagtacgagactccgtctcaagaaaaaaaaaaaaaaaaaaaaaaaaaatcaatgaaaacaatagctcccttaacggatttgccactgtaattgatcttcagctaaatttctacatccatttgtatggcctttcaacttttaacttgctcctaagctgtgggcaagaaatcaaagccctggcttctgcctcttattttagcttggttttgcgacgtgatgcttctgcagaaacaacgcatgacattgaaactccacggagaattcggatttgctatacaaagtattttggcaaaaaggaagtgacagcctttcgagtctgtggccttgagttaaaaaaaaaaaagatacagcttgtagttgattctgtgtgtgattttattttactgatttctaattagagatttgagagcagaaaatatgtattttgcctatttaagcatggttattcagtttcatctagattctattcttctttattttacccaagttttgcttccaaggttgtagagtagaaagcagaaaaatagctagttgcctagataaagtatgtgaacagaagtgttgatctatttagcaggataatactattcttatttgccttgctttaaccattacaaatgaaccagaaacttgtactcataagttaaatattgataacaagaagaaatatggacttagagacaagggaccatttgcaatattcactgatcaaagcagtacaaaggatcaaaacttttagatctagtgcagatgtctcaggaaatataacatgatgccaagcgaatggcagcaaaaagctgaggctaaaatgagtactatagtttcaactgagaaaaaaaatcaaattattgtaccaaattccctaatatcagatgtgtataaacttaagaatattaaatacctggcaaacagcaagaggacagttttataaatcataaaaagcatttgtttaatgatcaaatgttaaagatttggtatttccagaaaaaaaagtgttgacaaaatcaacctttaatagcgttgaatattcaagcagatcagctcaagcagtgcattcctccactgctgtgctgtttctcgggtcttcagctggcatcatttctaattttttgcactgtagcttgattatagtcatatactggtggggggaggaattgaacaaacacaagcggatcacagaagaaaaaataaagtttactggtttctctaatcagagtcataatttactattttacttaagaacaaaactattccttaatatccagctgtaaaatgaggcccacatggttaatattctcataagatccttacacatcttctgggataattctctttcaatttctgccaggtatatgatgatattctgtcattattatttcaacatgacactctaattcacacgtctttagatttaaacacacatacctactccccatctgtatttaatgggcaagctgtgtgattattaggggtgacctaatttgatttactgaaccaaacagagagctcattggaattaaaggactcctgtcttataaagaaccctggcctgcaagttagggagagacattagattatctttcatgtgctagtatgatttagagacctgatagggagaactttaactcaatcctctgggtctagctccctaagtataatgaaaggagactcaattagaaaaatgtctaagtctcagctttcctctaagatacctatgagccatgattgagtcaggaagaacttgaattgtcaaatctttaacacaatttttttccaattaaattaataataaaggagattaggagaggcagaggaagcagcaataaattctattcccaattataaagcattgagggattgcattaaataggagtcttcaaaagaaccataaaaatcaaaggatgggattggggaaaatgatgtcagaatagaaatccagtctcatttatacttcgagaccaggaataactgtgaagagacatttgacatttctcattagtctaatgtattagcatcagtgaaggtcttttgaaacaaacatatgagacttccattctgtttttttgtctgtttcattctgctttgggaggaagtgggaatttccatttaaagagacaagcggggtcagtgcatgcagcctaccagaaagaaccactgtgccgagcctgccgagacagattcgccccatgtggtggctgcacctgtgatcccagctactcagcaggttgaggcaggagaatcgcttgaacccgggaggcagaggttgcagtgggccgagatcaagccattgcaccacagcctggagacagagagagactctgtctcaaaatttaaaaaaaaagacagattcgccacagcttcagccatcagggcaatcccaagcgcagtgacaagctctagagcagcagtctccaggctttttggcaccagggcggttttgtggaagacaatttttctgtgaagggtgtggggatggttttggggcattagattctcataaagactgcacaaactagatcccttgcgtgcaccgttcacaatagggttcatgctcctgtaagaatctaacgccgctgctgatgtggtggggtggagttcaggtggtaatgtgagtgatagggagtggctggaaatacaagcaaagcttcccttgctcacccactgctcatcccctactgtgtggtccggttcctaacaggccacagataggtacctgtcctcagtccagggcttggggaccccgctctagaggatgtgtttatgagagacagagctccttgtctctttcccagccacagattcagcccatttagtagaaatttccaaagtagactcttaggtgttgagtgatctgactggtcacagcaggaggcaattttagagataaagcaaatgacttttcatctatacaaatcgggctcctataaaggagtgattggatccacagactcccaagtaactgaattaaggtgacgatcactaggcgcaaccacattagaagtttaagtagactcaagtaggtcatggctatctttccgtgctgcagtagaaacatttttttgttattactaaaaattctggtaattgtttaattcacaagagtaccttgtctgtcatgttattttcctttccaggctaaaatttgcatttcaaataaaggaaagacttacagacaccagactttctaaaatagattttagcaacccatgctcaatatcatttctacttgtttcaaaatggaaagttttgtgatttatgacatgcattaaaatagtcccagataaccaccagtgacagagagtcaactgcagcgggttcctgatctcattgtgatccccaggagttaagttgccccaggctgaaaataagcataacacaaatggcagaaaaggaaatgttggaggaaaattgtattcaaacacatttggttgaaactccaaagtgtagtagatattattttgaatttgaagggaggcatttgcaaataactaatctttatcaagtgccatgcttttaggattctgaagaagacatgcatttttcataacgttattcatgcaaaatatctcagtagtctcagtagtcatttttttttaaccaaagtataatatcacagaggatattttaggattggattggtttcatttactcatgattaggttccattcaaatataaaggttggttgtaaacctgaattgacttcagatgtccaagttaaataataacttctcaaagccccataatgcctcagcaacttttttctttcccggtgcaaaccagggccgatgttacactccatgtatttgctgcaatttctatttctcaattgccttttctgttgtttcatctttgacctactcttctggagtagtctggatctagtaatctcaatatgtctaaaatatgtctcaggaattcaatttgaacaacagttcaggcaaatctcaaatgaatatagacttatatggaaaggatataaatggttcagggatgtattgctttctatgcagacgtaacaactccagcagtataattcccctgctgggtctccacccctctgatgctctctattctggggaagtagagcaaattctttgcttggtgagtttggaaaaggaaagtaggaacttggagcatgaagcctttctctctccaccctggaaacgaagtaccaggcaatgcatatacttcttacgtttgctgagaggcacagtggagtttagagggggaggaatggagggatgttggtctaatccagagttttatattaggaagttcatatggctatagatatcaactaaaatggttgaagtcagcttagattgtaataagttttggatttgttgggtgctttccagtggtctcacacctgtggaagaggtgtcttatttctcaatgcattcataattcagacagagaagaaaactttattttttgggtcccttctgtgtacacaggcagacaactttggaaagtcatctttcactggtgaaaatggaactctattttaaagacaacaaataatgatttatttggaaaggggcaaagggttgaaaaactacctattatacattatacaatatacccatgtaacaaacctgcacaggtatcccccaaatctaaaacaaaagttagtattttttaaaagacaacaaataactaaccattgtttgaaaatgaggccaagcatttgatacagatgtacctccaaaaaaaaaaaaagcttaaatctttgtaaatcatttgtccatcaaaggagacctattaatttacctatattactaatttcaagggttttgtcttactaagacagttttgattcttttgactttaccaaaatgttattccttaaatacagataattacctttttcatgaacttcgtttccttctacctgcaaatcttaccttggttgctaaaattgaatagaaccctccccctggggtcactgccatgctgctatcctggctgcctggctgatcctagttcctcaatggccactggttgcaatcgacctgctgaaggtttgaaagtggcttccaggagaccaaacaaaactaagtgataggaagtaaatgttaaacaaaaacaattttaggtataaaatggaaatgtgaagttacagacatggattctggcttattttttggaaataaagtaaaatctatgatgatcagaatttaagaggatctcaaattgtaatatttacttccactgacattttaagaggaaataaacagttgaattacttatttttcaaaaaacttctgtgtaagtaactttatggtacttgctatagaagaacatagcatgtaatcaccttaatcatttagatgaaaagtcaatataatggaaaaggtaactaggacacgaagaggtgttaaccagaaaaatgatgttcataagaaatgcccaacagctactcacactaatagtataatttacgttgatataatatcaaatcaattactcaaagacctccaacaacaaaatgtggattagaattcagctaattcacttactgagaaagaaaagaaaagcatgtttcattattcatcaaatattgattgactgtcaactgtgtggacactgtgttaggctcagagaagacacagatctgtgctccctggagttccatgttagtgcagagggttggacaataaaaaataaacctactcaatacataaactgcatgctctgttgggagatgagtagtgttatggaagagaagaaaatgtagggcacagtaatgggaaagacaatgctagtcttatgggggcaaagtgtatcgtgtgtgtcaatgagaggtgatgtgaagcaaggattaaagggaatgagggaaaaccccataagaacactgaggaaggactattccaggaagggaatatggctgtggaaaagccttaggttaggagccagactttcagggggcagtagaagaagccagtgagcctagtgaagaaaagcaggaggaaaagacatctgagaggcaaccttcagggtagagaaggtcagaccaggcatggttgtgcaaagttgccatgatattcagattttaatctcagtaaagtggggacactttgaaggactaatgtatcattatattatccacgtaaagcttaaagcacttaacctttgctgataagaacatttacggaccatttcataaaaaaatccatcttgcagggattctgacaactttgggtttgttcaaatctgatgccatattcaacttgcaaatacgattgttgtgaatagaaaattagttgaatttactatggttcaaaccaacaaaggtggtgactaattttagtttcaaagttctctgagatagtctatcatcaccgaatacaactgcccagttacctgccagagcaacaatgggacactcactccagaacagtgtttggggacactaaatgccgcaggaggcagtggcagacgtgatcctagaaaggaccgtcctgcggggattctcggtgtaaaggagaacccttccccagagaaaccacatttactaatgtgcagagaccaccaaatcagcaggggcccccaacatcttatctgtcctaatccatctgggggcggcctgaaacactgacaaaaggtgtttgtctttgcatcacccgattcagaactcacatgaggcacaagagatggacgatcctcaaaaaccaccgtagggcacgcaaagccaccaggacacgcaaaagatcacaatggaggcaaataacacagtgcccaaagctgcacagaaaagctaggcacagattttctctgggatataaaagcatccaaaacatccctgcatagtgggaaactcagaaactcacacatatgcccagggcagaatacactctcagaaaagacctcacaattttcccaaactttcacacctggttgagcagtagtttcagtgcaaacaagaaggaaaaactaaggcagagttgtaaaaagcctggcgaagtgttgaaggagggcccagcacacaaagggtcaactggcagactgagagaggattttcatttttgttttgtatttcctttctgcctctcttttcctttctttcttattcatgtccattcccttccctctctgtctctctttctcactcacgcactcttggcattcatggaaatctctgtcaaaacgctgtttaaacattagttaaagggacaaaggcttcaaagaacaaacatagaaaagaatataaaccttataaaaattgtttttaaaagtatttaattcaataactacagcaataaaacaattcccaagaagaataaataaaattaatttgcacagttaccaatgtataatagtaaacatggccagttctcaaaaaatcataaaacattaacaaaaagaaaatatgacccactcacaaaagaaatgaaaaaaaaaaaaactctccctgaaaaagcacggacatttgaattagtagaaaaagacttaaacctactgtttaaaatacacccaaatagctaaaggaaaccatagacaaaaaggtctaggaaaccaggagaatggcatctgaacaagcagaaaatgtcactacagatatagaagttataaaaaaatacaaatactgaagataaaaagtacaataactgatgctataaactcatgagaaggtttcaaaagttggttaaagcaggtagaagaaagaatcaacaaacctaaaattaagaaagttgaaaatatccagtatgaagaaaaatattcagtatgaagggaaaaagaagggaaaaaaataaacagagcttaagaaacacatggggcaccatgaaacataacaatatatgcataataaaaaatccaaaagggaaggagaaagagaaagcagcagaaataatgtttgaataaatgactgcaaatttccaaaatttactaatcaaaataaatcaacacattcgagaaactcagatacgtgtaggaaggataaactcaaagagatccatactgggacatattttaataaaattttgaaagacaaaaacaaagattgaattttaaagatggcaagacagaagtaacttattatacacaacagatccttagaaagagcacctgcaaatttctcattaaaaattcctggaggccagaagcaagtggcagtatatttttaaagcagtgacgcaaaaaagcaaaaacaaaaacaaaaactctatcaaactcactattctacattcagcaaactatgcttcagaaatcagacattgataaactagaaataaatatattcacaaatttttaaaagcaaaatgctacaatgaatgccagtgcggagtatccacaatgaaataaaaagacttcggaaagtaaagcaatgccgttagaaaaattaaaaactacaatcaaagtcattatactggtaaatataaaagtcactattcttatactttcggtttctaactcatttttcttctatatgatttaaaagacaaatacataaaacaatcaccacacatctgggttaatggtaacacaatttatgaggatataatatgttcctatgtgaacatggtctggggttgggagtctagagctatataggagcacaacttttctatgttattgaaaatacgttgatattaatagaactagattgttatgattttaggatgtgaattgtaatgtctgtggtaaccacgaaggcaataactgaaaacaatacataaagggaaatgagagggaagtcaaaatggtacactacaaaaatacataaacaagaaaaccagagaacttcacaaatacatacaaataaaataaccgattaaaaatgtaagtacaaaaatgggtcaaagaagaaattccatgagaaaataaaaagtttcctggagacaaatgaaaacgaggacacacaaaaatatatatggaatcagaaaaacagtgctcagaggaaatgcatagctgcaaataccaacattaaaaaagaagaaaagatcaattaacaccctaactatacaactgaaggaattagagaaaggagatacaaataaactccaagctggcaggtaaaatgaaatattaaaaagattagagcagatatatttaaaaatgcagaacagcaaaacaatagaatctacaaacataatgtgacatagacttgcagtggaataccactcagtcacaaatgaaggaagtactgacacaggctgcaccatggatgaaccttgaaaacatgctaagtggaagaagccaggcacaaaatgtcacagacagtacaatttcacacatatcagatacccagaagagttatatccatagacacagaaaacagattggtgattgccagagtctaggccatttccaaggcgacaggggagtgactgtttaatgagtatggggtttcctttttggatgataaactgtttctcatacagatggaggtggtagttatacaacattgtgaatgtactgacgcctcggatttgttcctgagaatgcttaatttatattaagtaaatttcattttaataatttttaaattaatctatgtaaccatccatattaacatgctaaacaataaaaatcaaataaatcataaaaatcatgtccatcagggaaaaaatgcatgtgacataattcaacacccactcaggatcaaaacactctgaaaactaggaatgaagaagaatttcctcaaattggtaaggagtatatactcaacttgtaactataattatacttaatagtgaaaggctccatgattttctcctaagattggataaaagaaaggatgtccactcttattcaatatataattgggagttctcaaccagtgcaaaaaaaaaaaaaaaggaacgaaataaaatttatatacatctgaaagggagaaataaaactgtccatatttaaagatgacataatgttctttgtagaaaaccccaaggaatctaccaagaaattcccataaccagtaagtgattttattaagtctgtaacatggacagaagagttaaaaacgcaacacaatttaaagccattcaaaaatacttaggtgtaaatctagcaaaacacatacaggatgtgtttgctgaaaaccagaaaacacgaaagtaatgattaagcaagataccatgtcagaaaagtaaacataggaaagatatcaatgatcccaaaattgacacacaggtttattgcaattccattacaaatcctaacccaacttttgcagatatagagaagattattctaaaatgtatagggcaagacaaaggaactggaatacctaaaataattttaaaataatagacaccaaaatcacaatctataaaataaaaaatattataaattatagttcagcaaaattaaaaacatttcctctttgaaaaatcctgtaaagggaatgaaaagacaagctacagaccgcagaaagtatttgaaaatcacatatttgacaaaggactaacatctctaatctataaagaactctcaaaactcagccataaagccaacaatccaattagaaaatgggcaaaattatgaagacatttcactgaagataggcagatggcaaataccatgttaaaaggtactcaacaacattagctattagggaaatgcaaattacaactacaatgagatatcacttcacacttacaataatggctaagcttaaaagaaaaatgataaaatcaaaatctggttagcataagaagaaaatggatcatacatacattgctggttggaatgcaaaatggcacagccaccccgggaaacagttggcagtttctttataaaacacaacctgcaactatcatacaacctaccaattgtactactaggcatttatcctagaaatgtgacaacattcacacaaaaacctgcacatgaaattttatagcagcgttatctggaataagcaaaaactgaaacagcccagatgtcctttaatgagtgaatggctaaataaattgtgttacatccataacatctaataccactcagcaataaaacaacgacaataacaacaaataaaaacagactgctgactgatacatgccatatactggatacatctttagagaactaggctgagtatacaaagccaatcctcaaacgttgtatgctataggattcgatttttataacatttttgaagtgacaaaaatatagaaatggagaacagattattcattgctatgggttaggcggtggggtcaggaggaacgtgaatgtgactctacatgagaataggatctttgtagtgatataaatattctgtatctccaatgtgttcatctcaataccttagctgtgatgttgtactatttcctggctttgcaagatgttaccgtaaggggaaactgagcaatagatacaagatatctctccgtattattgtttacaacttcatgggaatgtaaaaaagtcccaaaataaaaagtttaatttcaaaacaaaatatagactaagatcaatgtttttataagaccattaaatcgtaataatcctatatccaaaaaacggttagcatgaagaatatgttagtcctaggtaacagaagttgtagaatgttaatgttatcatggagatgaaggacggtagcatgctgagacaagaatatacgtaaatcacaatcagtatcttttaataggattatattgacagtttctacatagttacagagttattacaacatattcaatataattttgctctattagcaatgtttgatgaacaattatatcatggacatacacaggtcaatgatgtaactgtgttgagacattatattaagataaaaatttgggactagagaaacaccacaattacactttttcttttctaatagattgcagtacaatatataaatttcaaaggaaatgaaaaccccctattaaatccttaaacagggtctaataacctgacatgtttgcaaagttatgctataatgattttttataattaataccaaatttaataaacatttttattttgtagacaaataagaggtttctaaaagtaactgagtaatgaattactcagaggaaatgagggaaagcagagggggcgatttataggaacatgcattgttcctgaaattgctgaggaaaaggcattagattctacaaaaagaccacattgacacgcttttcttttaataacactaatttctttttattttctccagtgaagcactttgtttctgcagactggtgctttctggtggtgaaaagtccatctgtgtttttcaggcactttcgctcgtctccctggagaatgctaatgtaaagatgtcattcatgtgcccaacaatgccagtcttgacggctacgatttctcacatcatgttcttcagaaatataaaacccctttcagccgccacttcgttttgtggtctactttcaggagcatttgtacactgcactttcagatgttacgcaattattcgtcacatacacctcctgctccaccgttcctatggatgatgctcacattccttttccaccagggattcaagctcaggtgacaaacgagtgcccacatcatcaaaacattgtggcaggacacttgtcatggtgtggaaacgcgggtgacagtgtttattccaaaatgagttagccaaaagacaaaaagagagaaagaaaaaggaaagaaaggctaaagaggttactcttaaggaatgttcttcaacatgatttcctttttcatgtggagaaggcttttgttttgttttgatttccctgaaaaatctctgttccagcccagagctgactaacatgactggagagagtcaagtaagccaacccctgaggacaggagggccagatcacgtgggcttaggacgccacggagaagggatctgtgtcatttcctctggaaacccactggatcagctgggaagtgctggttctcttggcaagacaagcctgagacacattatcccagcccgatttttactgctgacttttcattacctgtatatacacgataacacaaagttagggaccagagcaaacattggacaaagcccatctttttaaaggggaaagagcagagcaaaactacgtagaatctacaggtatttctttcctctaagggactctttggaagatgctaagtgattggtttgggtcaatgtccctgccgaaatctcatgtccagtagtaaccctgaatattggaggaggggcctggtgggaggtgattgaatcatgggcacagatattccccttgctgttgtcctgatagtgcatgctagtgagttctcacaagacctggctgttgaaaagtgcatgacaactctcccttcactctcttcctcttgctccagccaaggaagacatgcctactttcccttccactatgattgttttaagttccctgagacctccccagccatgcttccggtccagcctacagaaccgcaggtcaactaaatccctcttttaaataaattgcccagtcacaggtagttctttaaagtaacgtgagaatggactaatgcactaagtgctgtagcagagcgcctctggttccaggcagaacaaatccaggatcgtcagacacttcagattctcacaaatacctgggctggatcaggaaaagcatcctggggttcttctcaaaatccagtgtcatctgacgatggctccactgggatggaaattggaaagctaatccagataagactgaggaagtggctcctgttgtttctggttcgggcaagagatccacaacacaatgctgttctgatgaagctacctcatgaaatcgcctctgtgaactgtgtgggttctgtgtgtgcgtcatcgtacagcctcatcagagtctgttaaaatttctcacacctggacaggtacaccagctggtaaagagagagatactctccctgcgcatctcaaagtagcccagggagtagttttcatctttgcattatcttggggacatttaagaaacactaaaatattatttctgtgtgactagtaagaagagattttcaatgctgggcacggtggctcacgcctataatctcagcactgtggaaggctgaggcgggcggatcacttgagctcaggagttctagaccagcctgggcaacatggtgaaaccccatgtctacagtagaaacgaaaattgaatgttcctggtagttcccgcctgtggtctcagctactccagaggctaaggtgggaggactgctttaccctggggagttcaaggctgcagtgagccgtgatcataccactgcattccaccctcggcaatacagcaagagcgtgtcttgaaaataaagaaataaataaataacaaaaataaatacatttttaaaggaaaagaaaatgttttcaagagttctcagattgtcacgtcaaattcacatgtgcttattattataacaggttgggagccatacacagcaaaaataaaagcaaaattttattttatataaaagtgtagatgctaatcttatagagacaatcaaattattcacatagtttggaactatggaaattatggcatctttatggtgagggaaaatcttctttgtatgcatttcaaatggattacatccatccaaactttataaaacacaatgtatatatattacttctttacagtttctatttacataaaaaacttgcattaggaatgtgtttgggaattttagatatattgaaaaattgtagcatctgaaaaaggaaaataatatctcatcgtgttcttcattttattattaccaaatattttaattttcaaactgtttaattattaatttgcagaaaaggtattagtttccctttactctccttccaccttgccacccagccctgccctctgtatttctggcaatctagattaaacctcctgcattttttgctttcttaggtcttttctgtttgtccatttgccaaaccctggcggcttctttcagagctctgttctcccacgaccttcctctccttcactttctctgaaacttcaaagtttggctggttctcttttctctcagattggccttcctctccctttgctgactttgaaatttgtaaggtaaattaactgaagactaatttccaaaaagtaaaccacccgttttaggtgaacgggtccatgagtcgtgaaagttatgtcacacataaccatgagtaacccataaccatgagagattcaaactccacagctaacacacaagcattcccagcacactgataagatcctcttgctcctctgtggtcagccctctcccccagagggtggcagctggttatcagtgatatgatttccatctctgtagctttgcctttcccaggtcatattaatagaatcatacagtgtgcatgcagccttttgcaatggcttattccacgttagcataacgcattcaaggtccacccacgctgttgcatggatccataatctattcctctttgttctgagtagtgctctatggtatgaatattaaacaatgtggttaccatttgcatattaatatttgtgtttgttttccatttattagcaaatataaagttgctgtaaatatttatgtaaaagtcttcctgtagacatgttttcatttatcttgagtaattacctaggaagaccttgcaggattgtatagtaggtatatattttactttacaagaatgacccaaatgtttgccaacatgaccgtgccactctgcgttcctattaggaatatgtaatattgcatgaactctgcatcggcagcagcacttgttgttgtcattttttttgtttttgctttaagccatagtaactggcacataggacaatctcattttgcttctaggtaacgtttctgtggtgactggggggcgctgagcatcttctgatgtgcctgtcatacagcacatcctgggatgcagaataatgacctcccaaggatgtctaagtcctacttcctggaaactgtgaatatattatttaatgtggtggaggggaatcaaggtaacagatggaatcacggttgctaataagctaaccttagaatagaaagatgattttggaatagccagatgggcccaatataatcagagagggcttttaacatggaagagggaggcagagtcagtgtgaaagtgagtcaacatgataaggactcaatcagcaactactggtttgaagaggaaacagcacaggagacaagcaatgtgggcagcctctagaagctgtgagaggcaaaaaggtgaatttttactaagaccctccagaacggaacagaatcctgataatactttgatttttgaccaattttggacttctgacttctaaaactgtaaaataacaaatttatgctgtttcaaaccaataatattgtggtaacttattatataagcaacaggaaaatagtaaataatccataactgtaattaaacaaagtgtccaaatattttttattttaaaatgtgctgttttcttactgagatttgagagttcttcatacagtcaagtccttcatcagatatgtattttgcaaaaacgttctcacattctgtagtctatcttttcattttcttaacggtgtgttttgaagagcagaactttataattttgatgaagtctgatttatcaaactcctattttagtgctcctgctttttgtgtgttacctaattaaaaaaaaagttctttgcctcaatttgtgaagcatttataaaatttttatgtaatttttattcctttagtttatatatgtaagaatatcaatcattttgagttaacttttgtgtataatgtgagatataagtaaattttttaaacttctacatgtacaggtccagttattacagaatcctttggtgaaaagactattttttctccattgtgttaccttgtcccctttctcaaatattgttcggccacatatatgtaggcctatttgtggactctattttgttccatagattatatctatctatctatcatgttttccaataccacagtcttgattactgtagcatgaaaagaaatcttgaaatcagagtgtgttagtgatccaatttagtgcttctttcttaaaattgtcttggccattctagattctctgcttttctgcaaacattcgagagtgaatttgtccttttcttcaaaatgcctgctgatattttgatttggattgcattgaatccagagaacaatttagaaaaaaaaaaagaaactgatgtcttaataatatgaagtactccaattcatgaacatgatataccctccttttatgtaggtctttttaaaattttcctatattagtgtattgtagttcaaaattcagatttttatatattttcttggattgtccctgagtactttatgtattggaacgctattgcatatgggattaaaaaaatacaaattctaattttcttcagtgattgttggttaaagaaattcaatggatttttaaaatattgaccttaaatcacatggcattattaaactcttttggtttcagtaacattcttgtatattgcttagaatttttctacatagactacgtcctttgtgaataaagataatcttattttatccttccaatttgtaaaccttttatagctttttctagccttaatgcacggctaaaactgctaatggaattgaatagcagtggttagagtggccatctttgcctggttcacacatacgtctttgaaacaattcttttacctgccattgcatttgttaaaaatctacaatattttcgactccattttttaagctatagcgattctacatgaaatacctcatctcttattttgtaacattaacacgtattaatttgacctaatcttattctaccttgcacgtgtagcttttagcagatattgcctcgtatcaaactcaatgagttttctgaagtttaatcaactgcactgccatggatttgagtataataacttctgttatggcttctgatccttccaactttgataatggggcattccgttgaaaagcccaaaccacaaacccaaatctcatccacgtttgtaggcttttccattttgtaacttagctttcttggatgatcacagcactgtcattggtaggggttcttgggctgccttgaaccctcgtctctagccactgccacacacagcactctaacttgcttttgatgttttccattattattattattattattattattattattattattattattattatttgagatggagtctcgctctgtcacccaggctggagtgcagtggcacgatctcagctcactgcaagctccgcctccctggttcacgccattctcctgcctcagcctccagagaagctgggaatacaggcgtccgccaccacgcctggctaatttttttgcatttttagtagagatggggtttcatcgtgttagccaggatgttctcgatttcctgacctagtgatctccccgcgtcagcctcccaaaaataaaacattaccagtttgcctacaacctctctctagatagttttccatttccagtgttctcttccttaatccctcaatgaagtgctcaacattctccatgatttcttctctatatctgttatcctctctctaccatgtttatctctgtattttctattaaattcaggttgaatctgtttcctcagatctctgaagctttattttattctctttttctaattcatctattatttctgaactagtgttagctttatttctaatttggtttcttaggtgtctaatcttccttttaatctcactcatttcctttgaaatattactttcatcttatatttcacagaatttacacagctcttaatttttacagacttataaagctttacttcagctttaaaaaatctgcatttggcatgtgttttctccctatttccttcttcgcttcctttagggctgggatgtgaatactttgccttctcttgctgtctctcttgcttttagttcccttaatgggacagagatgggggctagacatatttactactgatttttacctctgttatcgtttatatttattcactaaaaatccttacaagaagttagctctacccagaaggtacactccaattggtaattcctccaatccgtatttctcgatgagatttttggtaatcatacaaatgatttctcctcatttgagaaaatagttgtagttttgtttttctagttcctgaggaacaactacttggaactcaggatgtggacaaccgtatctagtcatctttcctttctgcctacccacttcttccaaattgacacatatcaatgagaattttcagagatttttttacccatctccagagaagcactctggaagcattagggtagctactaagtatttctgtttagaaactttttttaaccttccaacaaagttcttaacattttatagtatgaagctgttggttttttgctaacttgaacatttctgctgtttcttttcttaaaccctctttacatagttttattcaccttcttagggtcagaggtagggggtactgcaaatatttttctagaaggagaatgatttaagtagcaatatttggaaagacatccaagaagaatggtttcttagccaaatcacagaactcctcaggtttctgggcttctagaactgctgaaaggtgcagagccccagtgtgctatactcctttatttttgaaagtcatgagtttcatgttttatgaggattggagctgctgagctgaagatctattaacactagtgaagtgttgctccagaacaaatgaactcaaccatctgaaccctgctaggagaaactctgtagaaagggaagctggtttggtgcccccacgtccacaagtgtaagatagggcaaactttctgattagggtagggttagaaatatagtttttcatctcctacactcacattaatttttgcaaactaaagtccctccatgtatatttctgctatgccttctctcatgttctttgtgtggataatgtagaagaggcatggcctttagtctcctggaagctctcatttgcctcttttgatggtttttgtggccttggccctagggaatagctgactttgtcttatttatgaccgtgtcaagattgtggctaataatgaaatacatgttctcctaataagtgaagtcatgggaaagaaaatgtgtgttttggatagtcaaggagcaaacatgtgtgtcctgtgagctagatacgtggtggtcttttaactactcccacttgaattcattattataattaaaagtgctaactgcaagggatactgtgtcttatattctgatcgttacccttaatataaaaataaagcacatctttgctataggcagttctgtatgacatgcattttgataatatcactatgcaaatgttacctgctataatataaaatgttcatccaaatattactatgataggtttgataggattcacgtctcttaaggcagaccagaaaaaaatagttggctctaagtggttgagaaatacaagtacacaaaaatttataatataaagaaaaaaataatttgtttcatgtgctcagatgaaagtcatactcttttcttagaagagcaaaagaacgtgtttgtgtttggtggtggcatgttttgatgggggtactttaacaaggaaattttagtgacaaggatagctttattaattgagcagtcatataacaaacagtcatatgacatccatgctatctcctgactacagctttatcaagaagctccttaagcttgcctacattggctgctgttttatccactaataattctcaacacagtcattgcaaatattacaaagcagaaccctgctggtttgaatctgtggcttgaaaaactagctgcatttgcactcagtattctctcttcaaatcctgcggcatgatttatgtacctatgatgcttagtattccattcctcttagtagtttcctttcaagatgaagtattcaatccttttaccattgaagtcattagataatttcttggtgactattagggcaggttactgaatgggccctagggaaacgctaacatggcaattctttattcttgttttttaaacctaattgatgctgtttatctacttaaaaaaaattacagacccaagtctgtttgtgtaatcaactagaaactcttcatgaggagaaaaattaacatttggcagacaagtttattgtgataattctggaagcacgacagaaaagccactgttctggaataatagcagtgatgtcggcaaagtgtgactggccagcttccaaataagcatcactttttcctctccacgtgaattcaccagacactttgaatagtctcaaacaacgttatcttcaacagttcctctctcagcacagagagcttcaactaaaacgttttaaaatggaactgttttcatgattcagtttatagatttattttttcttacctcaaaatatgggtcagaaagtattgcttgtgtgtgtgtgtgtgcttgtgtgtgtgtgcttgcacgctcacaagcatgcctgctttcctccaggaggctctcagcctgaaggagccagcgaaaaacttacgtttgaggagtttcatttatgcttcatctttttaaattatcttaaaaacgagaagatagaaaccctccactaagttgccaagcatgccagtggagtgggtcagctttctcagtagggagcagcacctcgccgaggtaggcagtgttttgctttctcagaacatccagcatggtttgggtggcttactgagagcatgacagtgatgacaccaaggcagtcctgtaccttttgttgaaagatagagtttcctttaagaattcggctttctacagtgacaggacctggtcactgatcttcccattgcatgaggctctcacacagtgaaatacctgctggcttccatttgccaagtgtcctggaacctcaggaagagaggacaatggcagctgcagagaaggttatatgtgcacaggtcacaggacacatatcaggaagcttttgatctcttgtgctctcccaaatgaaaacttctctagaacttcatttctcaacctagggtaaaaggtgagatgggttggatgctgacttgaagtaactgtaaagagacttagagcctgttcacattctcacactttgaagtatgggcagaaaatatttgtagtgtatgtaaaataacccattttctcaatgagaaaagagggagaataattccttttatattactgatgaaaaaaagctttaataaggatctttggtgaaatatgcacctataatgtaaacaaccaatcacagaaagtgtaagactattgctgattccctactgtaaataaaatgtgctacgtatgcagaaaaattaaaaagaataaaataacaaataatgccaggtgcttgaaaaagttttgggagaaaggggagaaaggaagtaagactgcgcacacacatgcacacatggtgacacaacacacgcactctcatacagtgacatacccagtcacatgcatacatggtgacatgacacacatacttacactcacatgcatggtaacaaaacacacacacacactcccgtatgtagtgacgtacacatatgcatgcatacatggtaacatggagcacaccgaaacatgagacaacaaacacattcacaaacatggcgacatacacatgcatacatggtgacacggcacacatacataacacacacgtttccatagtggcatacacatatgcatgcatacatggtgacatggcacacacgcacacggtgacacaacacacacacaaacatgctgacatggcacacacacacaaggtgaaacaacacacaagcatggtgacatggcacacacacatctgtagcaaactgaggacattgaggggaaaaagggattctatggaaggaaaaagaaagaaagaaaagacatttatcaggtacaatgttaaaatttatgccaaatgtttatttaaaaaaactttttgtaagagtcccttatgaattctcatgaaaaagtcacaaaaactattaaaacgcataaaatgcaagacccaaagactccagggcaaagttagttttacagatcatcctttgaaagggtttagcatgctgtctataggtgacctgctgccatctgtaaggattatcctcctttccaacctagggcccagaggtgttgaggcacacttgatatcattggccacattatctaaaacctcaggaaatgattgctatgtgttttgttggaagagtttcctacaaaacagctctcagttagttcccctttaatatctagcacctactttctaccttgtgcttgggggaaactctgggggcaattcacagactacctctattctaggaatcatgctttgtggttctagtcctcatttacatcaactctgctaatgcttcctcaacattttcccccaagaaaacccacagctggtcaattaaatcttgacgacataatgctaagtgtaagaagccagtcacaaaaggtcacacattgtatgattaagtttgtatgaagtgttcagaatacatatatccacagagactaaaagcaattgagtgcttgccagggactgcccgtgatggaagtgaggggctggggaatggtaatgattgctgaaagatacagggtttgggaggatagataaaaagccctaaaattaataaaggaggtgattgcacacctctgtgaatatattaaaaaccatcgaattgtgcactatacagaggcaaatcttacggtatgagaagtatatctcaataaagctattattaaaattctaaatggagactttctcacttatatgcattattctctttatataaaccagattcaaacattggccatctcacagcagatgtccactggaaccatagatgaggtgggaaaatcgatctaatggtcagacctcaaaattttggccatacaattatttgttcactggaggggttggacctagtggtcctgagttgaaaaaagcgggaggttatgttgagtctggcatgtgcagggcacagggatggacctggattgaggctgaaaaaaatgctaaggaaggtaaacgcaagtggaaatagataggttgatgccaggataggttgaaaaaaagttctgaagaaggtaaaggcaagtggaaacaggtagggtgatgccaggatgggaaggtctcaaacacctggcagaggaggctgtgtgtataaatgctcaaagggaatgagggaacagtacgtactcagtaaaatcagcaggagaggagcaacttgaccataatagtattgaacaaagatgtaccactaaccgttctggtacttgaagctttggtgcaaatcaggaacaccaaggagacaaataatagtgtttggtaaaacaaacaaaacagaacaacaataacaacaacaaaaacaaaccctaatatatggaatgtagaagagagtagtgcaaatacatatagaagaaaatgcaaggtttcctggcctagagtatcagcatgctatagattgaatcgtgtccccctccaaaattcatgtgttaaagtgctaagcccccaatgtgatatctggaggtggggcatttaggaggtgattagctttacatgacgttagaaggtggagactctcatgatggcattagtccctttataagaagagatgctagagaggctgcttcctcattctcctccatgagaggacacggtgaggaggcagctgtctccaaaccaagaagagagccttccccagggaactaaactggctgcaccttagtgttggacgcacagggctccagaactgcgaggaataaattcttgttgtttaagccacccaatccatggtattttgttatggcagcctgagctgactaacacataacatttatatagtttcagttttttctttagttttaaaccttagaacctaacctgttctagtgaacaattctttttccaatacttatacaccatgcagtatttaaaacacttaaaactttcacttcttatctctgaaggggcattgttggagcctaaagagagttatcaacatcaaaagttatttgtaaaataaatgagtgtagagaaatgtttgacatttgaaaaatacagggcaaaaccttaagtttatcatttctgagctggctgactgtttttgtcatatttaactttgctgagcctcaggattgtaagaacattaaataaagaacaatacacggataacaagtcataaatcaaaccagaatcaagactgtaatggagggacaagttctgagaatggtttgatatttcaatgtagagacaataaaggcctaagttgaggtggtagtagcagcagtgattacaatgaggacagaataaacataaaaaaagtaagcaggatatctttctggcaatctcaaaattgagctgtttaagtaaaaatccaagagttatatttggtattttttttgcatattttccctattcatctgtactcccttacattgcattctacttgtcaacagtaagcctgtgtttacattcaggtactctgttttctttgaacgaaagccaaaggtactctaatcatcacatttatgcagtgtagtaaggtgcctaattgtttcctaaacaaaaagtatctaaactatcatactagtagaaaaagagaaaaataaacgttaagcctggattgaatgatttgttttatggatgtgtctgccttttatagataatagcaattcttcacatttgctttacatttggccttgcagtttttgaagcaaattattcacttttatcctttcaacagtcctagaaagtagaaagagaagcgatgatcccccatattgctgagtggtaattacacaattctgctatgcataagatgttttgtcatataaacagacatgttttctatattatcaaggtcatagaccctgacctaggcattgaatagttttgtggtacttgggattgaagattctttagagttgctcttctcctttgcttatgacaccctccctctatatattaagataaattagccatgtttctcattccctgccaaacactgaaacagaagctcctgtatccatctgccctgaactgcaccactgccctaatattagctatgtccttgactttgacttccccatccacccctcaaccacttctgggagcctctgcagctgctggagtatgtcttcattcctatcttcaactctccttcaacttatcacaggtcctgctaattttgccttccgaatatatctcataatttcctgttggtctacatcatcactagcaccagtttagcacaagctaccagctaccacggcaccctttaacggacttcttatctccattctcctttcgcacctgcagcaatctgttttccaagttacaaaggaaaaaagaacaattttattatagcctatgtagcgtatcaatgtcacgtcatagtttgtgtttctagatctctcccccagccctcctgcccttagtttgttcttagcccaccaaagcttttctttgttctcttcagcgagttgctcattttataaaatggctttgaatgttttgttcttctgtcctggaattttatatattgagagagagatatacatattttatatatagagagagattttagatatacaggaattttatatacatagagagagatgatatatatagagaaattatatatatctatcatatataatatatattatatattttatatatatataaaattttatatagaattttacatagaattttatatagagagaattatatatatagaattatatatagagatatgatatatatagggatatatattataatatctatcatatatacatatataatatatatgatacataaaataatatatacattatatctctatcggattttatcatttatatggtcaggtaactatacataatagttcttaagttactgtagaaataatgctcagggaattttagaaataattctactttgttgaaggaatccaacaatgtagttagaaattaaagtgaagaaagaaattacaatatacaattagtttatcattataaacatgtgctacctatttatttatcttggataatgggacagagtttcaacataaggcatttgaattagagacagattctctctctctctctcgttctctctccaaccttgtttcaacacactacaatttatatagttattctctaatcatttttatatgttcaagccagaagaaattttccagtgaaggatttccttataatctgcactacatcaagaatactcactttgatgctttcatagtgcctaagtaatttttctttatagcatttatcactgctgcatttttatatttctttatgtaatcattaattaatctctctgactaattgtgaatttcatgagttctactttgactcaccgttagatgcagaaaacccattagagttcttggcaggcaacagatgctcatcaaatacttgtgagcaaaaaggagaatggaaaacagaaggtaatgtaaaaatgacaaaagaagaacaaaaaggaggcaaggatggaggagaaacgaagctgaagaatgtctttaaaatgaagtattaacacatctgaatgctgtaaagtgtgacatttaatgaactatatattgattccgtaggtataaaacactagaaaaaaaatgaaatagacataaagcctgccttccatggtttgatgtcagagacagtgataaacaaacaaatataaaaccaaatgggaactattttagtaacagcacacatggacacacacccacatatgaattaaaggaactctcttatcaagctggaaggagcaaaacagtctaaaaagaatttttcttttttttttggccacttctgtaatcccagtgctttaggaggctgaggcgtgtagatcacatgaggccgggagttcgaggtcagcctggccaacctggtgaaaccctgtctctaatgaaaatacaaaaattagccaggtgtggtggcacgcacctgtagtcccaactacttgggagggtgaggcatgagaataacctgaacccaagaggtggaggttgcagtgagccaagatcatgtgactgcattccagcctgggcaacagagcaagactctgtctcaacaacaaaaaaaaagaatttgttaacaaaactaaaaactatcacatttttattatcatttatatggccaggtaactacacatgatagttcttgagttactgtagaattaatgttcagtgaatttcagcaataattctgctttttgatggaatctaacattatattcagaaattaagtgaagaaataaattacaatatgcatttacattactactaaaaacatgtgctacctatttatttatcagggaaatggatacctttcaacagaaggcatccaaataagataaaaatgtcttcaaggaccctgttgttaaacacatgtgctaatttcaaaataaatatctacaggaaagttgtctctcgtcttacctttgagcaagttacctttaacctgtatgtagcaagggtgtggtttttgctatcaatgtttcctcagtcactgcccagtaactgaaattctgtcattgtaaaaagtttacaaacagtaatatttgacaaacaaatagattgtacttaactacataaaccaaaccagccaaccttaccagctatgctaagagttgtgtgctgccgactctcaacctcacccacagaacaacagggacctgcccaagatggttcattgtttgcccagatcacagtgaggttcgtgactctattcctccctcaggtagcctcacatctggtcatctgcgcaagtttctttttctgtcaatgtactttcccttcttgatatggccaagatcaaccacaacgcaagttctattgaatctggctctgggagctgtctttgcagggctttccctggacacatggcactgttgctttcctgagtccagctgctgacgtgaacacccgagaaggtagcttgaccttactctgcagatgcatgaagggcgaagttgacaccttctgcccatttttgataaacaatgaaatattaaacattttttaactttgttgaaatttaaaatggatgtgcctaacaacgaattaaaataataattaaagtagtaattccgccctgtttatttttagactagtcatcctcactccctctatatacctatcactattctagaatttcatgagtctagacttcgcttctggcattggccccaaaatgccaaatttgaggagcacagataatttttttcacactatgaaaactgcaataagttctcttaatcatcgtccttctttaatgataatgtatctacaaaagataatatcttactaggaagttaggaggatcaaacaacataactatctacaagaacccagacactcagtggatttttgctggatttgaaatttattagtttctgtaactacttatttctttaaatgaagctttatgctaagtaatatgtgtataaatattataaaatgcataattattttaaatgtttatttaaatatgtaatagattaaatatgtaaaatatatacaatgcataataaatgcaatagaaatgctcatttaattttaaaaatagattgctgtttcccaaattaattgcaagtttttattaacagggcagatttagaaccatatttctagaatattagcgataacagcttgtaatttgttttagtactcttcaagtactttaatcttagcaatgtatgcaaatgatgtgaataaaacaatatgacattaacatgatttaaatatatttcacaaatcatagataccttgcacagtatttggtaaaaggacaactatgaatatacacagcagtgtatgtagaatcagacctgttcttaggaatttcttcagatctaattgtgttctgcaaaaatgcatgctgtgcttctggacattccgctgattttcaaaaatacatgttatgttatcactaatattttacaaggaaaattcgaccgaaaaagtaatatgaatcaaaaatctgaaagcaccgggtcacttaattcaacctcgtatctttccctactaatgttactgttcaatacaagtgcactttctggtgaatttccttcaccctttgaaactacattgagtgacgtaccatgttctcatcatcgtaccttcacacttgatgacactgggcagatgcattaaattatagagagggaggaaggagaaatggaaattggaactgctgatggtgagccagcttgatagggggccaccacattctaagatagtttttgtgtttgtttttgtgacagagtcttcctctgttgccaggctggagtgcagtggcatgatcttggctcactgcaacctctgcctcccaggttcaagtgactctcccgcctcagcctcccgagtagctgggattacaggtgaggcccaccacacccagctattttttgtatttttagtagagacgaggtttcaccatgttggccaggatggtcttgatctcttgacttcaggtgatccacccgccttggcctcccaaagtgttgggattataagtgtgagccactgtacccaaccctaagatagttttcaatgtgatatgataagcacacacacacacacacaaacccctaatctatctatattgatgtgtgtgtgtgtgtgtgtgtgtgtgagagagagagagagagagagagagagaatgagaaagtcatgcaacctctggaaacctccttgttttttaaattcagaaaaattaacttgcattatggctacgtaatgaaaaataattaatgtctctcctgattaacgaagatgaaagcaaacaatttttgacataggcatgaatggccaacaatacttcttgagaaggtaatctatttttggcaattgcattttctgtaggaaatgagagaggtcatttgaaaataagaccctagatatcgatatgaataaatccagtctgcttggcttttaacttctactttgtatcgttacatttgaaaagaggtagtacaatatctgatataagtggtgttgaaaccaccaatatggtttgctaatttcagtgggcattcttgctgtctcttcagtatctatttccctctttccatcatctttacaaaaccccagcttttccagtcactggactttggtgaaatgaaaccacaaatggtgagcacaaatgatgtctcaatacgttgttaggtaagccaagatctttcctttgttgtttacgccaatgttagttgtgctttctggtgcttgctattgaaaatacgacgagtggaactcgagcctggtaaatattactctgtggcttcactatgtgcttggttgctggcacgtcaatcctgctctcatacatccccccttttcctcatacaaaataacccgactttaaggcagaattaacaaaaaagaagcctagacctattgtgaaaaattagcatcctctgaaaagataaagaggtatttaccccatgttatctaaataattttaagaaagtcataaaacctctgataacctccattttctcctccgtaaggtgaggaaggtaactctgcagaaaaaaatgctcagaacaaatgttcagagtaagccctacctcgtgcttggtcactaggaagtgttgatttattttctttgctttcttgtgtttctgtggaaagcgttattaatacgcttgaaaggtttatgtcattttattggataaatttgttgttgttattttgagacagggtctcactctgtcacccaggctgaagtgctgtggggtgatctcagctcactgcaacctccgcctcctgggctcaagcaattctcatgcctcagcctcccaagtatctggataactgggactacaggcacacaccaccatgcctggctaaatttttgaattgtttttgtagagatgggatttcactatgttgcccaggctggtctcaaactcctggggctaaagcaatccacctgccttagcctcccaaagttctaggaatacaagcacaagccactgtgcttagactgaaaaatgctttttttgattagtcagaatgctgtatttaaattacttgttgtgtatctgtgtcctcaggtatgcatttagtaattttcaaatttcgatgatttgctatgaattttttttcataggaataatatttctatatgaaaaatagaataatatgaaagatacaggaaaaagaatgtttttcattagcatcagaaaaaaatccaattagaacagttgttttaaaaacagataagataatacataaatgtatgatgcagtctgaacactctaaggacataggcttcttaaaggtatttatttgtaattttggattttaggatattacagatcacaatagtgtacagcttcttaccttggaaaaatgatactctaattctatattatttgtccaatattacgttgctgtcttagcttgaaaaaatagtttaaatccttcagtaagtatatacgaagcaacattatatataagaatatgatttcacattaaactaaatacactgaaatgtttttatccaaagactactaaatagtgactacatattttcttaatattttaataactttggaacatttttagagaaatgtttctctcatttctttaggagcaataagtatcttcatatatatatatatatatatatatatatatatatatatagtcacacataaacacatccaaattatctcacttcttgtgaaatataagtattagaatagtccaatgtcattgtggcatagaatttagaaattaagagaagtttcaatttgtactattatttacatgtaacttatgaattagtatggtcagttctgatctgttaatgtttttacaaattttacttattctaagggtaatatgttcatgaaacaacttagtattaccatgaagagtctaatgatctcaatttccttttcagaaagatatgttaaaagtaattaagataaaaagaaaagcaaaatccaaagtacatttaatagtaaatgcatttccaactaggtacacaggcccatttggagtggttctccaagccgaaaccctcttgctctccttttctgagacctgtccttacatttacacactcattatatcctgaaggacacacttgattaagggaagtctatcagactccactcctgcacaagtagagtggacaacaggggaggctatcccatctctgtaagggattgtgccaggacagtaaattagcacctagaggcacgttctattgtgaatcactgttggtagtggagccagaaaacctttcatcagacagttgaggaaatgacgaggaacctcgcagagaaggcggccctggagtgtggggactcccagccagtccagtggctctgtttccttggggtcccaccaggggtcctgatttactggtagtaaatttcccatttttgcacaattagctcagacatacatctatgaaacttttctaggcactaaggctacaagaaaaaatggcagtaaaaataagaacaagtagacaattactccttggaatatgaatctgttcatttggatcactaattgtcaagaactttataggaaaggactaattagatatgtgagcagcatgtcatatacaagaagagtttttaatcaaaagatatttatcacagtgaaatctgagaaaatattcagtatcactgactgagtattgctcaagtgaatggttgtacatcagtatgatggcattttacaatttttgtaagtttagaagaacatttaaaaatccagggaattttgtacaagtgaaaaagcatattacataaaatgataatgatttcatatacacacgtcaatagacaaggaatgcaaaaaccttaaataccataaggttatttatgaataaggacacgagaagttcagtggattttcttctttatacttcggacaactttctacaataagtgtgcattgatttttaatcgtgcaaaaaataggagcgcagacttggtaaaaatcggttttctgtttgtccaacaacatataacctaccttcttgattctcaaaatgaactctatgaagaaacttactcatcaaatttcaatactttccaaaccttaaagctcgcatcttgctttttgaaatggataattttttggtttgttttgagacggggtcttgctggatcaccccggctggagagagatttactttcaaataaatctctgttttcaaaaaaacatagagattttcaaatctaggctttgccactttcatactgggtgctttggccctgttagcctgtctgaaccctcttttgaaaattaggaatgatattaattgaatgtaaggattataaggcaattaagtgaaataatacatgtgaaacatcatacatacgctttccctgtctcagggaatgaaggatagctgtaaaaatattttgaactataaataattaatcataaatttcaactgatttgattttgcaattttaattattgagaacagtaagtaaaaaagagatagcttattcatgttaaagaatataatagacaaacctgtgctactctttcttcttctactaatcaatcacttactcaacaaaactgtaaaattcactaataatcttgccttttacatttgctcccaattgctgaaatggaagcctattttaatgatagtaagaaaaaaagtgacactaacatagaacaacgggactcagaaatcaaatatagcagcttccaacatgattcttctgacccttacccagttatcgagcaactccaacatatttactgccttctattattatgaagattcaactcataaaggcaatggaaataatcattgtatgttgtaaacaaacataatggacaagaaagggcacaaggaatctcaaatgagaataatggccgtaaacaaagtgctgcatgggagaaaataaacacaagtacaggtctacttaccacatgcatcatatcaaaaacttaatcatggccaggcgtgttggctcatgcctgtaatcccagcactttgggaggctgaggcaggcagatcaccttaggtcaggagttcgagaccagcctggccaacatggcaaaaccccatctctactaaaaatacaaaatactagctgagtgtggtggcacgtgcctgtaatcccagctacccgggaggctgaggcaggagaatcgcttagaactcaggaggcggaggttgcagtgagtcgagatcacaccactgcactgcagcctgggtgacagaatgagactccttctttaaaagaaaaaaagaaagaaagaaagaaagaaagaaaaacgtaagcacaccatcacaccatgtacttcacagagaaacttcacaggaaacaaaatcaattaaatttgaaaattgagtacaaggaagtgaaacggtaaaataaattctgaacattctttttaagaaattacgtttcaaatctgttggtgagaaaaaaatatttattaggtcggtgcaaaagtaattggagtttttgccattactttcaatttgccatgactcatatttataggtttgctaaaagagaggttgatttccctttgggccatggccaccttgattctcaaaatgaactctatgaagaaacttactggatcatctttaaaagcactgacgttgttataaacacaaataaaaacggcaaagactgctgattttaaaaccttattttctcaatttaattccacagttgttttatgaagggaggtaattggcagttttatcttgtcttggatgactctggttgtgtcattcactttttcgttacagaagctgtgtcagaaaatttgagatgccaaattatgtgctattccctacactcaagaagagaagcagtgcaaggaacgtacccttctttcacctttggagttagtaaggcttttctttcggagctgtcttggattttcctcttgccaagcacgagagtgaaggaatgctttcttttcaacggcccattaaaacgaacatatatgcaatcatgccattcctgattgattggattcaggacaccctaaccctaaatatggcactctgacatttgagaaaactgcagaggcaggaaggccactgtcacctgcccttgctcttctcccccgatgtaggccataagtaggccttgtgcgagagggggcctccccatacctagagaaaagaaataacctgtctctgaaaacacgggagcacagcgaagaacctgagcaaacagcccctgctacatccctgctgatttataagcattagatcacaagtccttcgtccagtctcacgtcccgacgtctggctacctcttcatcaaagccataagtgaaatatacaagttgacctgttgctctgggttttcatttccttacgaaggctcatattacataaatttgtaggcttttaactattttgtcatgggggcctcagccatgaacctaagatcagaagaaaagatccttctccttcgcttcagagacccatttgaaaggttagaaccatgaaagcctcaagatgcaatgagctgcagggagagaaggaaggaggcaaaccctgagcaggcgatggcccaagaccagacagaggtggatttcctggtgctggaagaatggagacgcacttggaagtggaggagacacgtctccagtcctgaacggcacacagggaggtggcaagaccactcatgatgctggcacatggcaccagccagcgaactccatgcacccatggcagatgtcttctgaggctgagcttcaggcgagccggcccctgtgcaggctaactctgtggtcgataaaagctgccatagcacacagaccatgggccagggaagagcaccgctgccagccagagaggcaggggtcttagtgtgagcatcagagccaaggaagaggctttctgatgactgcatctccaggcccctggtagccacaggatgctggcactatcagatgaaggaggacaaggagccttactgaggacagaggatgatgtgtgaagacagatgcatagatggagaagagccagatcgaacaggactaaagtacattaagtaacgtgatatagcttacaaatgtcataaaaatacgtactagagtggaaagaaaatgaaaaactttcaatgttgataatttagtcaacactaagtccacctgatcaatttagaagcaaattgtagaagagatgccagaagacacgatctctgggaaggtttcttggtttatttgggaaataagaaattgcagaaattttataggagcatcacaagaatttaacaagaaaggtagttactctgtattttcccggtgaattatgaagtgttactcacagctaaatccgtgaaggcttaaaatgagctgccgctgtttttgatctttcaagatagctaaacagaaagagtcacctcccctttccacactaggttcttcttctatttctggttccctccttttgtcaccctccttcactaatgatttcagggaatgcatgcacagacagatacacacaaacacacatacatacatacacacacacacacacacacacacactcatctcctgcatgcctgtgtcaggagccaatctggataacgacatgtcatatgtgaattgtgatggttgatctttcacatcctagacatttaactctatctgtagcatctttcactgcttcttgattctatctggtgtgtatttcaagtacctacactgttccatttttagatgatatctaattgattgccctatggctcagttcactctcttacccagttttaaagctttctacattcatgtagaaattggaggattgtatgaggtatttgattctaaggttctaaggtatttgattctaggagttttttgtgagtgtacgagagtcaagattctttgggttttaaatatcaatccttatatcttacgtcttagcttcagatacaaatttcaatatgtatattgatctaacataatgaatctatgtcaaaaaactgaaaaagcatgggcttgggatgcaggtcaagtcaccagaactaaaaagctgtaagtgcccaaaataatggactatcaggttgagcgtggcctaattaatgctctgacacctgctataccaaaccaagaagggtgagccatctccccgggtccctgctgccagcaggcgtaagcacttgtatggtgataataagcaaaatgcattgaacttcattagaataccaaggaaaattctccaaaatggctcttaattaaatggtctcccactaagcagcagtcagagagtgaacactccctatattttattcaactgaatgtcatgttgacttcagagccatttgggggggtctttacctaagaacaatgcttcctatttacatagttattttcatatgagattcgtgtagcactccacaaatgtcatctcattacctcatgcagtgagtcaattacagcactgcggagataacccaagactcaaaactccccgtgctttgtgagaacagctctgtaaacatcgcaagtggtctgatgtgatgcctgttgtagacaggggaaatgaagattgacataaattctataactcacgtcagtgtgctaacagcacaagaatgtgattgtccattaaagcattcactttcttatttttcaagaaatggccattttccaattctggtatcaattacccagaggaagttatagaactaaattgtctgttcatatgaatacaatcttctgctgtccacataataacttgctttattcaagagtgaatacatttgcacctgtattgataaatttgttctcaacccaacaggtaacttagtgatcatataatgcctgaattcagcaaaggtaacaggccccaaatctggaaatttcaataggtttattcttttgtgttcagatcctactgtgaggtgattttgcatgtattaaaccaagcgtaacagtatggaaacaaagttcaccagctccctaattttggatatgtaggaaggtatatttgggttttgctagtcaaatacttgatcttcataatgctcatttccagaatgattttttccacattgtagagtcatatttgtcatctaaaattgtctatatgtttcataagaaataagaaaacatgatttaatgggtatgcatttatattagaaggatttgtggggaaaaaagggttttctttatgacgtatttcttggataacttctcagagaagttttaaagtatcataaggattattaagaatattcaagttacaatacatttttgaaaagctgaataacacagttcagtaagatcttttctagttcagaggacagaaaaggtgtaagacaaagactgtatctgaggcacccaagtaatcttttttttgcgaaatgcctttgctttggttcctggccaaatgaactgcagatcgtctttggctgcagttatttctgtacctgatgacctcttctattaaaatgatggtggtttaggctaactccatatggaatttatctatggggtcacaaaagtccctttctggtgcctttaatactagactcattgtatgtttatatgaatgattaaaactactatggaggtaagaaggaaagcctgttttaatacacagctacaaatgttatcactttctcccctgcaggaagtgggctgtattactgccgtaagcgtagtgctaaagaatcgtaatttaaaaataaataaataaagcaatgggtttagagaagagaatgggtttgaagcattggtaacattatacggagaagagttacaaagccttctataatttgtttttctatttcaacaaattcatgatattgtgaaagacttattacaatgctcataatttaagattaccctcacagtgttatttacatgtcagtgcagttttttctctttgcatgattttaggctgtgaaaatttctagaccaacaagtcttaatgaaatttcccttgctttcaatcctgaagaggacgacctaacagtttagtgactaatttaagtaaaaagcagtggaaaaaattaaaacagctacttcccttcacctatagttttgaatgagtaaatgggggaatgttgctaacacattcaaaatttcagaatattcaacagccaaaaaagaagaaagttgcagaatttaaggaaatatcaaaatttgtattttaaaagttttactgggtaatataaattatgatatttgagtggtatttcctggaaaatctatctgtcatgacacatcgcacttcagaaaaaggatgaattctaaaatattatattttagcaaaaagcatgcttgttcctcagtcatgtgaatacagttattcacacaatccttttgtgaaataatctcagcatttcagcaggattttatgaattgaatcattatactgcagttgtttcacagggatctgaaatcttgatattattattttatttttgagacagaatctcactctgtcaccaggctggagttcactggtgcgatctcggctcactgcaacctcttcctgccgggttcaagcaattctgctgcctcagcctcctgagcagctgggactataggtgcatgtcaccatgcccggctaatttttctatttttagtagaggtggggtttcaccatgttggccaggctggtcttgctctcttgagctcatgatctgcctgccgtggcctcccaaagtgctgggattacaggcatgagccaccgtgactggccaaaattatttttacgccgtgctttgaaacatgcacctttaaaatggtacctgggtatttttaaatggattttccccatctttatgacagaatgaaatagcagaggacattttaactgcaagggaaggaagtgaaggaatcaaagaatgttacccaaagaaactgcaaatcagcagcaaactcctagggatgggctggtgagcagaaattaaatgggaaagccaacctgtcagcagaatgaataggtggagagtgtgaatttcagctgtaagccttagtttaattttctttcctgataacctctaccacaggctgttatttcaaagtcactgggcccactcacctagatagacacctattactaaagcaaccaccttcttgcaacatattgagtaattatattcatcttgataacatccttcttgacaattttatcattgatggaactctccgcctgtgaaggttatttgtatttttccccgcttctgaccttatgtcccatgaaaagggttctatagagcaaataccatttgttatgttatcttgggaaatggccacacttctccttccaggaactgtggcaaaaattattttctgcactccatctatgcctgtcatgtctgccttgatggagtgaaaggaacatctacctgcctgccttaactacgcttattttcaacccaatttcctgaaggtccaggtacactacattgggaatctgtagctatctagcccagcagtggaatgctaaattttaacctttaaatcattgttcaaatctaaccacagcagataaagtcgaagaggttttaatgggccagtgttttcacacttctcaaacacactcctgtgatttggcaggtgccatgaactcagtttggggacattttctcctcactccctataactagtttatggcaaataaactgcagctctcgttttatgagctctcctctgtctcaatccatcttcagtgccctcttgtacagcagagctcagtcctactatcctgaattatgataatgcggggcacacaacctaccctacaaatgggacttgctgtatgctgaatacccctggcaccctggtactcagcccaggggctccacctgctgaaaacctgccccctgtcccttctggaaaccagcagcccctggcctgacctcacagggaaatcatggctacttaccgacctcactcaagtcctctgcaagccactcccaacagtcaagtcttaagatgtacgttttcttagttatgagaaagggagaaactcattaaaggaaatttaaaaacaaaaaaagaatgtattaaaaacaaagtaaaacaacaaaacgaaacaaaaaactgaggttctgcttcccaaacacatatcccggttgcttttcgtggccaggatttttaaagagtagaccgtccttgaagctcctggctatggtcgaccacatgggagttgaaggggttgataaaaagaaaatatctaagacataatgtctgagttaaggaacaaggagcagccacatgaagagggccgggaagactgtgagccatgggtgagagcgtttccaaggattctgcaggcaaagccatgtggggtccgtgaggctgcagcagacaaggactgaccaactgtcctggtttgccgatggtcaccattttataactgaaaagtcctgcagcctgcaaaccccccgataacgtgcaaatcaggatgatctcacatcatgcctaattctagttcctattgtttcttatacgggccctccctggaattctcaaatttttaaatttctaccatagcagtcatgaactactttctcatcatactgtgaggtgctagacaagactctatggtattcttctgacttaattgcttaaacactgaccagattcccagttttgcctcattgacagtgggccaatccccaagaggtcacctgccttatttctgccatggttcctggaacaaagctcatcatgggaaaacgtcaactcctgtccagaggccaatcttctctgggtgctgtgatactgactacactacacagctttcttctccacatcctctcggaagttcccagggcccactggaatcttctgagtgtcagggttgctctcccttcaagctcctcttaattccttaatttggccagtgtttcagtaatgaaatgtgagacaccatgctcaccccttgggtgacggccatgagcaagaaatgttctctgccaataacaagttcaaggttcatggagaggtagatagggaagaaggaatagcaaaaacatcataactttgtataatgtgatacagggatgcatggtgcatcttatgtgagtagagtggagaaaacagctggatggtaggaggacttcctggaggtgtgttctggctgtgtcagcctcaatattccaaacttgtttagctcttgaatctcattcttctctaactatgtggggacattagtcctatactgttcctcttttttcacttgagtctgcttctttaattttacatttttttattttaaatatgcatcaatcaaaacagcccattaggcagagtggtattgaggtaaaacaacgggatttttctccttccattttttcaaatgggtgatctttcattttagtattcattttctcaaaacttattctttcagagatgaggtctccctacgcttcccaggctggagtacactgactattcatagatgtgatcatagctcactacagccccaaattcctaggctcaagccattctcctgcctcagcctcctgagtagctgggaccacaggtgtgcacctccatgcctggccaggtcctattctttttaactcttctattttctaggttttcttttaacactaatatcacagtttgcagttattttcaaaggtcacaaatggtttctttattgtccatgtcatcacatacttcaaattcagggagactctgtgaaggaaagtcaatctcgggacccccaaatcactaagccaaagggaaaagtcaagctgggaactgcttagggcaaacctgcctcccatcctattccaaaaaaagacagcttctaagataaaaattgctacgtacctccctcacgatttgtccacgggaatttccttgtggacaaaagacagagctcaaagccttccttctgctctctgaaataaatgcgtatctgattgcttcctttgaaaagactaatcagaaactcaaaagaatgtaacagcttgtctcctatctacctatgacatggaagccccctccctgcttgaagttgtcctgcctttctggaccaaaccaaaaaccaaagtacttcttttttttattttttttatttttttgagacggagtctcgctctgtcgcccaggctagagtgcagtcgtgtgatcttgggtcactgcaacccctgcctcccggattcaagcgattctcctgcctcagccttccaagtagctggggctatctatatgcatgtgtcaccatgccaggctaattttttttgggggggtatttttagtagagacggggtttcaccatattagccaggatcgtcttgatctcctgacctcatgacctgcccacctcagccttccaaagtactaggattacagccgtgagtcaccgcgcccagcccaatgtacttcctagatacattgattgatgtctcatgtttccctacaatgtgtaacgtcaagctgtgcccaaccaccttgggcacatgtcatcaggacttcctgaggctgtgtcacgggactgcgcgtccttaaccttggcaaaataaactttctaaattgaccgagacctgtctcagatattctcgtttcatagctctcagccaaattttcatctttcagacattttactccaaaatccaatctatagccaaggaaacttctctaaagcactatgaacatacaggttctaggttcttgtacctttcacagcttacattaaaatacgaaggtattaaaataccacgtgattaagctccctttacttatctgtcatcttcccccttcccccttatgggaatgttcttaactaaccaagctggccaactcatcatcacttaagcctggggtctgaacttcgaccaccgtgacttatcaaatactcatttttgtacatggaatacacatactctttatttctcgaagttatttttgtcatttcccttcctatggaaagcttgcctgtcttctgaaggtttccctgagcactgcagttctaccaaaacctctctctctgaccctgtacagcctttatagtctgcactcctggcattgaaataacttcattcagcctacatccatgcttgagagtgaggactggcccctgttcacatgtgttatttacacgcatattactgaatttgaaaattgtaattagtcgcggatgaccagtgacatttgttaagatgttatgtggactcagttgttgcctctcctttatgatttatctcgataccctaaaataagttaaacgatttcattttttacagcagttttaagttcacagaaaaatgaagaggaagatacagaggtttctcatctgtcccctatcccccccaccacacagccttccccattctcaacatacgccaccaaagagagaggtgcatttgttagaacctatagacctaggttgatacatcattatcactcaaaggtcagtttacttcaggatttaccgttggtattttatgttctatgggtttagacaaatttattgtgatatgtatccccgatatagtatcatacagcctctagaatatttttacctgggcaatttaattttaaaataataaacagaggatcatctagactggtggcccaccactcttttgaacatgagaaaccctatgtatttgccaaatttaataacatttaaaattaccataggatctacatgaaagccggctgtggttagagacttgggttccggagggagaatgcctgtgtttaatcctggcttactgcacattagtcaggagactttgaggaacttacagaatctctatcttataaacatggattttaacggtatctggttcatgatcaatcaacagccttcaacaaggataatgccttgaagaattcagagaacagtttttgttacatgaaaatcattcaataaatgttttaaagccagtgcacatgtatgcatataggatatgttattttcagtctatggacatgacagatatgatagatacacataagaattcaatagttgcagaaaatcaaaagtactctgtgtccatttattgggatatttggtagcaataactttcaaagactcttagattattgtttagttcatctactataaactaaggcctacctctatagtatgaagaattttaactctttatcactgaaacatcctgcttctcctatttctctaaatcagagtcaattacatttgtttattaaagggaacagagggacgggaacttcagagatctgtagaggaaaacaggtcttaaacattatcctaccctggaagcccctaatatttggggaggctacagaatgatataggaataacagttaatttcccccgtattacccagatttattatccaaacaacgtatttcatacttttttcatttatctggtttctcttttattgttgtctttatccacagagaaggtatgacccatgaaggcaaggactttatctatttcactagtacccagaataatgcccagcacccaacatgggtgtccaatgactgaaggactgcatcagtgaatgtatgtttacacaaatttattaaatttcattccacaaaaatcacaaaatgtaagtagtgacagagctgtaaagctcttgaaactatgaattcaaaaaatcagggccaggttcagtggctcattcctgtaatcccagcactttaggaggccgagctgggtagatcatgaggtcagcagttcaagaccagcctgacgaacatggtgaaaccctgtctctactaaaaatacaaaaattatctgggcgtggtggtgcgtgcctgtaatcccagctactcaggaggctgacgcaggagaattgcttgaacccaggagggggaggttgcagtgagccgagatcgcgccactgcactacagcctgggcaacagaatgagactcagtctcaaaaaaataataataaaaataaaaaaatcagaaaaaatcattctacttatttttgattctagaacagaaccttgctgtaaaggcccttagaacatatagcaagacaagatgaaaacaagaggaccacctggacttagttatcattgcccttctcaccaaaagttgcattctgagaaatatttatgatgctttcatttctgcttgattttaagtggctactttacatgctagcaaattagtgtatttgggcatgctcatatttgcttacagaggcaagttcaatacgtaaaaaatttggcagctattaggtataacatattcctttggctttaggtggaattctatgtcctgtattgtttactcaattggggaatgtcgacgatagcaaaacaattgtagtattcaagtgactattgactagagttcagtcaataagttcaacattataaggccaaaggcaattaagcagggactgatattagttgctggttacacgatttccctggacagttttaattactggacatgagagttctgaaatatgtggattagttaataactcaaagtaaaaaaaggaaagcattactcatttggcattacaaactgtgataaaatacacacacattctcattctgtaagccataaacactaagccataatttcaaaattagtaaactgcttgatatttgtaatatcttacataatatgtaaaggaccatttttagtttaagaataacacagactgccaaccacgtttaaaacattggtcctgtcaagacaaatagtgatgcttaaatgtaagtattcattaccatctagatcttacatcgaacacttaatatgtccatagagaaataagattatataattggaagggttcatcaaaatattaagtgaagttcccaaacatgtcaaatataaatgaattcccaaatctgtgaacacttttgctttgaatactgggttttttttttttttttggaattgaacataatattatatgccacaactttctgcaccttcatctgtattaatgtaattaagtaagccctggttcttcatcagtattaaacattttagtcaacatgaagagctgtgtcgaatgctgtataaaggctcgtttcaaatgagtttttgatgaacaacggctcatggaacttaaagatgatgtcccaaaacagataaactggtgaatgcatcagagaaagaaggcaaaggtttctgaggacctccaaagctctgttctgcataaaacaggcttggtgtgattcgcaaactttcatgcttatgttctcataaggcagttgggatagaaaaccagctcaggtgtgtgttaggcctaaagaagtccacctacagggaagtttatttttgagacagggacagatttaaagataactgtttttatacaatggaaatgatagaaatttttttttttttggttctaaggagcaggaagtttaataggcaagaaggaagggagaagacaggaagacagaaggaagaagccctcctccctctgtacgggggagcattttccttccaccttctcccttccttcttacctactaaactctctgccccttaaaaaaaaaaattccaccatataaaaacaattcttgcttcttataacctgagactgatttagctttcaaccaggaaaatcctaaccaatagggttacttcaatacattttggcaatccaactcttaaacatgtgcataccctcccaacacacacacacacacacacacacacacacacacacaccaatttcaccgtcgaacgaacacgtcaggattatcactgccttgccatggtcatgctttgtgtctccactatctatgcctttcattaacttaaagcttgtccacagttttgggaaaaaatgtgctttgacgtagatgtcctgctagagtttgaggtcttcgctttctcattactcaatcatttacttggatgatgccagatttggaacaattaattccgtgtttcactctggacctctcaaagcctgctaagtatgtaaagttaatactcaaatgttttcctttgcttaaaggataactttcaaagagtttattcgcaattacactcctccttctataccaacagtacctctctgtttctagcagagtgctttacttctcttaatactgcataagaaaattgtttccaaaccttactcatctgagagtacccacaactcacaccttgtactgatcactctatcatcttttaatgcctgttctattgtcaagacccaggttcaatgtcatattctataaagttttccccaaatccatctgtgctaatgagaaagtcaaagctgtacatcgaacactcagcttatgttcttttctgtcttattaactcttctgtgtggatcctttctttctaatttaaccaataagaatataaacatcagagctcttggcatttatttgttgagatatgaaaccacaagccagataaaaatttagaacattttaaacaatgtcatcatccgtacatatgatttttaaaaatctcccagacaatttatgaggtgttaatttctactgtgattcatggaaagcagtgtttcatggttagtttgtcaggaaaggatatggtgcttgaactcacctaaagaatgaacaggtcttgccgatgcagagagtacaagtgagattgacaatactgcgagcaagaacaagagacaaagtttttcagatataatggaatcctttggaagattaaaatccctatctggatacacaagctaggattagaataagacaggcttggattctgtaattctctctcattataatacatggcttcaatttcttcatctcgctaatcttagaaagcttcacaaagagccatgaaggagaaaccactgagtccttttcctaatgagatgaaggagctcaccacagagtcatttttctaataagtggtgaactttttgtttaatttttatttttaactgacctttcaagacctattcagttcatgtttatgaaacaaaatcttgaaatcttagaaaaataataaaaccaagcaaaggaatcaaagaaagaacctcttgttttctagcaggaaaggtgaaactcaaattttgtgagtattataaaccaacgtgaatgttttaaaggattattttatcattaatctattatttataatacatattataaaaatattatttgttatcaacctgatcatttgctatactttgcttttacaagttttatacttataaacaggtaggtttactttgtgacacctcattgcttggaaacaacctgcatattctttaaatttaaaactataaaactatgcatgttacaatgaaaaggtgtctaatagagagacaagatatttcaaaggatgaaaaacttaagtgtgatttgcttaaggtctcaattagtgaaataattgggtatcattaacagaaacaactgactcaatctatcacaaaaaatgaaagtaactggacacataaagagaatatactatattctacctgtatatgatattcagaaactcacaaaattatatccataaagtcagcacattttattatatgcaacttacgctgcaataaaaatggttaacaaataaagggaaaggatatttctgtagaacggattagagcatgaaaaaaaggtaacagcaagaataggaagaaaggatgaagaacaatagacctacagtgctcctgttacatggagaacaaaaccagaagatttcagaggagcagagaacactgtggaaggtatcaagtaaccttcggtctcctgcatgtacatacttctaataataagtgagtttaggagctggggtttatcggtgaacgggaggcaaactagtgaacaaagtatgagtacataaaacatctgatagatgagttttattgaaattaagggtagagttaggatgaaaggtgaatgttgcaactccttcaaaaattcgttttttacacaaagctgtgggctcccccacagctaggggagagtccgtccgctgtgtgcccctagttcccgactgttctttgctcagagctctctcatcacttctcaggtctgcttccacctggcaaataccaatgataagtcaacttcgaaggctgcttttgagccatccttcctttgatgctttttttttttttaactctgcttaagaacttactactcctttgtttatcttgccaggcacctaacagagcacccaggatgcgttcccttactttgtcctgtgcctgaaccacagctggagagtctgatggggaggggccatgcacagtactcctcctccccgaccccagcacagaacacccaggccgcctcccagagggactgggaagcatcaatggtgggcatgggagggagcaatacagtactgattctcatttgagaatagctgttgatcacaagactctcaggttctgttccacagctgttgacagtatacaggagtttgaagtatgctaggtccacacatctcctctgtcaaacctttctccttaaaaaaaaaagtagagtggtgacaaatcataacattcctctttttctaaacacttttaagtgttactttcttcaaacaagttttagaaaaccttgggtggaagatttaatgaagatgcataatctcatatttactctggatgaagaatcccatgcaactccattaagaatcaacagatgcatcaatgatagactggataaagaacatgtggcacacgtacactgtggaatactatgcagccataaaaaggaatgagatcatgtcctttgcaggggcatggatggagctggaagccattatcctcagcaaactaactcaggaacagaaaaccaaacaccgcatcttctcacttataagtgggagctgaacaatgagaacacatggacacaggaaagggaacaacacatactggagcctgtcagggatgaggtgggcgaaggtagagcactaggaaaaatagctaatgaatgctgggcttaatacctaggtgatgggttgacaggtgcagcaaaccactatggtacatgtttacctttggaacaaacctgtgcatgtacccaataacttaaaataaaaataaaaataaaaaatcaacaggttgccttgcttctgagacctgcatggccatgggcctctgactggattaggaatctttgctaaactgaccctcctgctctccgaagtagcaattccaagaattgacttttgaacaacagttttgaaaacaaccttgagtaagatgacatcttgaagttcactctggaacattctaaatagtccccttcagtcaaaatgttgctgctgtttttaataacagggaaaataaaaatatttaccagcttaaaaaataaaaagacattcatgaattataaatcatctgaaaggttccgtaggagaacacactgccctttacaaaatgaacctcattaccagtccagaacacactgagaatcacaaataaacgtttccaagaaacatttttaataaccactaatacaaccgtatttctattgctaagtacaaaaattctaccgtgtagagtttcttgtctattctgtggaaggaaagaaagagcatccttttgcgggaaaatgttaggtagcaaaataaataataatagcgggattcatcatatcttctctttgtcttagttctttaatggataacattattaaagaaaattatttaaaagtctctaaaaagttaattatgaattttcatcatagactgtagacttctaaaatgacaaaattacccttagggtctcaaaatatacttttaaaagtaggtactctcaaaaaagaatgattatttaaaatgctgaaaagaatctggcgatatttttatttataatgttcacagtttagggttaagcaaattattttataccatacataatttgcatttgagtaatgtggcatattatataatatttaattagatgcaatatctggcagaaaaaagtatggatctccatttaaggagattcaaattttctttacaaaattcagtggatgatgctatagctcatacagtgtaaaccaacggttctcaaccatggcaatgatggtggaagtgtgtggaaaaattagtagggagtgtagataatcagaatcttctcagaaagtttttcaaatatacgtcgctccacggacctttctgcaaagatctccctttctctactgacagaagaaatagcgatggactcaacatcatttctgtcacctgtaatttcgtacttagaacatgcatgaatagcctatcttgcaatcaccaatgtatggataatttgtaattatttaaaacatgtatacttcatgaaagttataaaattgatacagtttttatcaattttgcaaggaattagatatacagtataattatgaaaagtaatgaaaacactttggtgttaaggaaatatttcaatttttcccaaactggggatttctaaatatttcaagaaaagtaatctagaagacaaatagtagttgacttagcattgcctgcgaccttgaattaaaagattttctttaaaaaaaatcttaaagtgattttactaaaatccagagtacagatacagaaaagcattgggatacgaagagacccgatcatcaagctcaacagtccccagcatttttggcaccagggaccagttctctggcagacaatttttccatggacagcagggttgggggacggttttgggatgaaactgttccacctcagatcatcaggcattagattctcacaagtagcacacaacctagatccctcacacatgcagttcacagtaggtttcatgctatgagaatctaatgccgatgccgatgtgagacgaggcggatctcaggcagtaatgctggttccctggctgctcacctccagctacgcagactggttcctaacaggccaacgtctgatacaggccttcatccaaggcaggtggggacccgtgatctagctaaatactcaagccccagtctctattaacacgtaagtcaaatttaatacgctggtagcaccttacattgtcatttaagtcatttgcatttgtaatccctgtgctatccccaagtatacttggaaaacagagacttttacttattttatattttattcagcattgagtgtcttactgtactcacaaatcagttgtctgggacttgattacagtacttattgcaatcagtaagaatctcagttgtttatttacttatctattgtttatgtggtgtctggcagagactaggatttcaataaatatttgcttgactgaaattcaatttcagaaatttgaatttttgtagtactattttctcccttcctaatctgatgtttcagtgccattatacagaaattgactgcttttgattacagaacattttcaaccaaacataaccacatcgatcaactctgtattttctaattctgtacatttcttcttttaaccattcttaccttctactggtcatttaaagaaaaccaatttttccaaaagtattttgtttgtttgcttgtgtgcttgcttaatggaatgcctgtcctttcaaatgttctggatatgtgtgagttgtcgaggcaggagaaagggagtggcagttgtcctaaccagcctgagtgagcttggaagtgcttcctactgcatctctatgctgatggggcaaaacaccctagagaaggctccaaaaaccctatggtaaagaaaactgcttaattttgttttaataaagtcttagtaaactccatgggtagtatggtttggctctgtgtccaaatctaacttccaattgtaatccctacacgtgttgaggaagcgtcctgtaattttggatcatggtagttatttttcccatgctgttctcatgctagtgggtgagttctcatcagatatgatggttttataagtgtttgacagttcctccttcaccctctgtctctcctgccaccttgtgaagaaggttcctccttccccttcaccataattgtaagtttcctgaggccttcccacccatgaagaactgtgagtcaattagacctccttcttttaaaaatttcccagtctctggtattttttttatagcagtgtgaaaattgagtaatacaatgggtattaaaaataacacatagttctatgttctagagactccattctaagaacatactttctggaaaccatgatgtaagacaacccagcgtctatcaagaacatgcatagtcatccaaagacacaaaaccctaatccccagtcgcctgtcattcaaaagtgtgctcacatagtcttcctgctgtgtacaattgcaattatcctctccaagaaaaggaaacgcgcacagcctttatctctttacccctagattctactacggcatatttcttttttgactgaaaggcaggagtacttattgaacagatatttttgactcatcttatattctgatactgcggcatgaacgaagctcttctttccggcccttgtatctcgtgtcatatgaatatcactcttttctgagtgtctctttaacgtctgaaaccatttggacattacaaatataatctaactaatattttaaaatatgactgaataattgataacattctatcttacagagtgtctagttctgggagaaagattattctatgagccagctgcatctgagtgtcctgggggcactttaaaatatacagattctttcatttgactattggaaaaatagtttaactaggtctattgttggtgctgcttatttgataaagaaatctcttcaacaaacctctggataaatgcttaggatgacctttatgaactgtaatttttttcaatattttaaaaataaacagtaatgtatttaaaatatgtaattttttatatatacacaatacatgatacataaaattttaacatataatatataaaaactatatattttcatgtcctatatattacatattttatattaaaattttatgtatttatatactgtacatatatattttttcaatatattttttccaaaatatttctaatatctggcaattgctaattgtttgaaagtcccacaacatatctgacctaaaatttctcttttaattccctgtccattaccttacatgtaccccatgaaataagaaataaataaaatacttttccacataacccttcaaattattatactccatactgaattagactacgttatctgcagacaaaaagtgtataatgaaattgctatagcataacagatgatatgaccaatgagctcagtaattcacaaatgtctctataatacaaaaggggaaagtaaatatagcattaaatacttttattcacaaatcaacatatttcataaacaaatatatttaactcggcatcatttaagtcaacttatgccatgtttaaattagttcaactatttaggaagtgtctagttagtataaacagtattttaggagtgaagaaataaagataaacaatttctagtcatcaatgtggctgaagttaataatggcatgaaagtccaaaaaacaaaagacagagatgtggccggggaggcagagggtcagagagaagggctctcactcagaggcaacagaagacgcatttgagaaagacagtgcttgacttgtgtcagataaacacagttgacccgattgagagaatgggggaaacttcttacaagtagcaagggcagttcagtgaaatgagaaaggcaaggcgaaaagcttctgattcatgaaactatgagtaatttgctcatctgaagcttggcagaggttggggttagagtgacagggacaaagtcatgaaggacctttctcttgaagtttggacaatgtcattgacagatctaacttaaggacttaaggtgatcagatctgagattaggaaagatcaccctggcagctgtgtggaaaatgaagcagatactaaatacagccagaaagctgttacagtgatctgggtgaaaataataaaataataacttcctcttattgaatagttattgcactctagacactgttgttaaaggctttctatacattatctcattttcattcttacaacggtcctaggaggtaaggaatattaggtctttaaacatgaggaaattgaagcttggagaagttaaattaatttcttcaagatcacaaaggagagctgggacattattcaaagaaaatctagatttccaaaagcatgtttttaatcgtgctgggaaacaaagacaagatgatcacatagtgcaggaatgctgatggtggaaggtcagattaacagaaacgcctgaatttttagaggatttaggaagggaaatcagcgtaggagtccgtgaacagttaaatggagaggccgcttgtagaacagatgctaactaaattcccaggtttttactgcaaacgagcaacaagagaggggaaagagccagccatgatggctcactcctgtaatcccagcactttgggaggccgaggcgggcggatcacctgaggtcaggagttccagaccagcctgcccaacatggtcaaaccccatctctactaaaaatacaaaaattagccgggcgtcgtggcaggcgcctgtaatcccagctactcgggaggctgaagcagaagaatcgcttgaactcgggagggagaggttgcagtgaaccaagatcgcaccattgcactccagcctggggacaagagcaagactttgtttcaaaaaaaaaaaaaaaaaaaaaaaaaaaaaaaaaaaaaaaaaaagaggggaaagaagtttccgtgtgattattgtttttaagacacatctcactctgtcacccaggctagtgcagtgacatgaacatagctcactgcagcctcaaactccttggctcaagtgatcctactacctcagcctctgcagtagctgggagaacaggcatctgccaatacactggctaattttttgtatttttttttatttttttgtagagatggagttttgctatgtcgaccaggctggtctgaatctccacaaacaatccacctacctgggccttctaaagtgctgagattacaggcatgagccactgcatctggccttcagtgtgactcttgattcccttcagaatataaatcattgtcatttacatagacatgcattttctctctccctaggtggaatgtaagctccgtgaacatttagacaacatctgtcttgttcattattctgttcagtgcctaaaactgaatatgtatctggtaaaaagtaaaactgctaatagtttcactaaagaaacaaatataggaacaatgaaaaagtaatggttaccatcctgataagtcacaataactcaatctgtagtaattctcttaaaaatgaaggtaaattaaaggaaggtgattgccaggtaatattgtatctttgagtcacttaaactaggtagccaatcagaaagagttcattgaatggttaaatttctagtgttttctgtcatcattatagacaccatcctaaccagattcatttttttttttaagagaaagatttcccaactgtggcggtggaattgtgaccccctaaagattcatatataaagtcctaacccccagcatgggactatatttggagagaagattttgtaatagatgtttaaattaaaatgaggtcattagggtggtccctaatccgacatgactggtgttgttataagaaagggaaattagaattcaaaacacacagagagtgacaatgtgagcaaatacaggaaggtggtcattcacaagccaaagaaagaggcctcagaaaagagcaatcctgctgatacctcgatcttgggcttccaacctcctgaaccttgacaaaataaatgtctattgctgaagcttcccagtctatggtactttgttatgggagccctagcaaagtaatatgcttcccaatatggtagactgggttggaaaaaatgtcttactctaatcacatggaaattctgaacgaaatatagcaatatggtgtttgatgcatagctcagctcacaatcgagagagaggaattcctcgatggtagaaggaaccaggctactcttgtagactggtgtggggagtagagttaaaaatgactccttggctaactgcaggtagaaggaggtgctgaactatggaggttgatacctgaggcctctgtgttggattgggggagtttaggctgtatgtcccattgtgtgcagcaatttggagccaagggacgaacataaagactctttttacttggggctgccctggcctcaacacaggaaatagagggactctgtccataggacgtaaggaacagggggagcctcatgtgccaccttcctcaggctgagggtacaaagagggcagagacctcgaggctggagcctctgtcgttgctcaccgtggatgggaaattcaatttgcagaagctgtccaaaggcaagaaacaaatataaaactggccaggagcccaagactactgggggtcttcagcaaagatgaatgtttaacctactctgaaggttttccacagcctggggcacctgtgggaagcatagcaggaaggctgggtgcaggtgagctccatcagtgcgtccctatggctcccagggagaagtcacaggggaaagaggcaggagaggaaaagagcacagtgtccagtcgtcccgcagagtaaaatacacatgaaatcaacggaaaagtctcaatgaacgtttaaagtaaacacatctgaaatggcccaaggattgaaaaactagaaaccataagaaaaaacagggtcttggaagaaaatatcaggtcgatttagaaattttgataaaaactgggtaattaaataaaaatatcacttgatagttcaaataggccactaagctgacttgataactagtgatttggaaaatctggggcaagaacacaaaatatcgcccaaggaaaagcaagttctgataaccttcgcctggaggttattctaaggggggattaattcctgtctgcatgctttcctctgcccagtaccaacacaagataaaatatatatacgtatcttcagtgtgctcttattcaaggtactatgaaatacatatatttatacacattttatatacatttgcatgttaaatatataatgtatatgtgtatacatttaaacgcatataaacatattctaaagtacattaatacttcaattatatatttaaataaacatatgaagtaaataaaaatatattattaaatatataaatttataaatatatttaatacaatataaactttatatattgatatataatggaatattatatatatatatatatgtatctctgtctctctcaaattacattgagtaagtgtgccaggagaagatggtgggggtggttatttaaaaagaaaaatggcttctgggtgcggtggctcacgcttgtgatcccagcactttgggagactcagatgggtggatcacaagctcaggagatggagaccaccctggctaacaaggtgaaaccccgtctctactaaaaatacaaaaaattagcccagcatggggccacatgcctgtaatcccagctacttgggagtctgaggcaggtaaaatgcttgaacccgggaggtggaggatgacatgagccaagatcgcaccactgcgctctagcctgggagacagagtaagactctgtctcaaaaataataataataataaataaaaataaaagaacaatgagaaaaaagacttacataactagaaaatggcctgagtccaaacataaaaggaccatgccctatcctgagacaaatgatggtgctcttggatgtgtacttgagtgacatgtgaggtgacggacagatgtgcccaggccttttctagttagcaactaaagaaaataaaattaggcaaaatcatgacatgatatttcagaaaacagtcttatgtaaatagcaaattattataagagaagtttggtaaaatggatgaaattctcaacaattttctcacaaaaaaaaaaaaccatgatccttttattactcatacttggaaaggcaaatttgaagtaaaaaatgttaatcatgctatgaaatgaggtggtgagaatcatcacacttataaaagagcacttgtttaggtcattttctatttatccaataaactgaagggcaaattaaacctttgttttgactatttattgatagccaaagtttccaggaaattaatgttaaattgcatagttttcgtaccagtgattctcagaagacaaattgtttagtaatagctgcattttcaaacaaaggtgtgaaagtaccttttatttttgtaaagcaaaatttattttcagagaaagtatttttgggacatctgtcctgaaaaaaaaagtgctatggaaggttttcaacaaaggacagagaaatttgaaaaaaaaatatattggtactaaattagaaatatagtctgtaagagaattatttttgcagtcggaaaagccaggaatacttctttactgtaggtaaatttaaaaaaaaaatccattaaagtctttgagtctaaaaacaatttcaatataattccagaatttccttcagtttggtgtgtttatgtagtttttgtttgcttttgttttttgtttttaattttcctcacaggagccttaaaaaaggtcccgaaccaagtagttttcttctatcataataatgatctttgttaataagatggtgatgatggcacaaataataccagctggattaagtgcctactacaggaaagggactgagctggctggctactgtgcacatctcatttgcggtacagttttaaactcaagtcagtgatttgaaatatgtggcttcctaagagtctacagagaaaatctagaagagattttctcaggagaaatcccataaaatgcatgttcactgccatgaagaagaaattaggcaatgcccctggaagtcaatcaatgggactgaccgtggttgaagctggatggcatagaccagtgaacctcttctatttcatttcttcaggctcaaatgtctgcgaatccattagctcttgacctctactcatgatcctcagtgcaaatagcatcattcaaaattggctgaggatacatgtaggtgagagtacacttcagtgtgggagatgtaatttaatgatggtcacttccaaccacgcatttccagaacggaaaaccctttgatttgtacatggcacacacagaactgtctaataatctgtaggtcaaaaataaaaccagaaggatgcaggactacctactcttactctgaacccttctcacaattttttttcccatgtcaaagcagaaatggctaattgcttgcaggaaaatttcccttattttccttatccctttatcagagcaaagatagtaagtgaaatagaagagaacagaaagaaggggctttagaatactgaagatatttaagatctaggatttgtttatttttgatgagatttgcagcatctttttcctctaattgggcaactagtaaacatttcacaaatagataataatagtgacggtgtgtttttttctctctctcttttttcacttgtgatattaaaggtgttttgtttcctccttctttcttttgggaccactgcctgttggtttcgtgctgaggcacatacatgactgtactatctaaagtttctatttcagagaggtctaatctggatatattttagtagacatccatgccgatggatggaagaagacaattttcaaaaagggtgcttgattgacatacaagtctcgcaattagaaaaaggaaaattttctataaaggcaaatccacgggaattactggcagtaatattaatgatattaggctgcctgactacaaggtgtgatcttagggatactgggaaaggtcttctgccagaatcggtccccgctgcacctcaaatccccaccattaaagtcattcatttgagttaagaaaattgccactaggacctctattaaaatgcaaatgtgttccccgggtggggaaacacattaaatcattatcaaccattaacactttagaccaaattagtttcagatttattagccaattactcaagtacagaaggaatgcggagcaggagagtgtagtttaagttggtttttggaaacctgggatgcttaaagacccatccggtggtgtggtgtcttgccatagcttttatctttttattagtcagctttgtgtttttgttttgttttgttttgttttgttttgttttgttttgtttttgagacagactctccctctcttgcccaggctggagtgcagtggcgcgataccggctcactgccatctccgcctcccgggttccagtgattttcctgcctcagcctcccgggtagctgggactacaggcggctgccaccacgcctagttaattttttatttttagtagagacggggtttcaccatatgataatgcataaagttctcacataacaatataaaaaagtggaacgtctcttaacaaaacagaggtcaggacccagagctccagctgctcgccactgcctcacggcctcctccccaaaccccaaacctggcccctgaggcaactccacggacaggtaagttctgagaagcttgggctggagatcattctaggagggtgtcattctaatctgcatgctttcttctgtccttttaattttcctatcttttgaagatgggcagaagccaaaagtggaggtggagataaaatttgggcttgtggggaggccgaggagggtggatcacttgaggtcaggagttcaaaaccagcctggccaacatggtaaaaccccgtctccactaaaactacaaaaattagccaagcatggtggcaggtgcctgtaatcccagctactcgggagactgaggcaggaggatcacctgaacccgggagacagaggttgcagtgagccaagatcatgccattgcactccagtctgggtgacagaacgcgactctgtctcaaaaagaaaaaaaaaagaataccttgtgttctgcacaccaacaccaagctccacgtccaccgtgttgacgcctcctctgtcattccgccacctccctgagagtcagcagaaatatactcatcctaaacaaacagatgccatcttttttctctttaagaaaaagaaatctagacctttctcacacttgcaaagtttggggtcagggggtcaagaatttaaattaatatgtgtaagaaattaaaaaatgtgcatcaactgaaagacaaaaataaaatctccccaaaaaggaaatggaaattctaagtcaaaatacataagcgctttcatatgcttcatcttacttaacttttcagaaatactttaataattttgcccaattgaacataacagatagagaaggcccaaagagaagtcggaactttcccaagttcatagggttattgaataacacagctgagattcaaattcacaccactcatccaaaaacacaggccctttccccagaaagacatacttgtctttaatttcatttaaaagaagctaggcagttcaaatttactcgagaatacaaatttccacttgtagaaattatgccacttaaattttgctgaaataatagaggaaaaataatgttaggaaaaatttgggattaaaatagactcaacattataaacagtaacattagatttttcttttgctccaaattcttaaaaccgaagaaaaaaatctgtatacctttagaataattgtataatttgactatgatccatagcagactttttggaaggtgtctagagaattctgctgctgtttttgtaaaattagactgtatttccctttatgctcacagatggcaataatttcatatcattttaacatttcaagcatttttttatgttattcagggtctgttatttaagtccagataattatccaaaaacactccagtcctctcatcacttatagttcagatccaaaaactagtaagattaacgtaactataaactaactatgctttagttattctattatttcgcagaaaaagaaaacgaagaaatatgaagaatgtctgagtgtttttatgaatttgaattcataacctaacctgtgtttggctctgacaaaattattaagggttacttaaagctaatttgacatgatttctgtttggtttacacaaagtaattcagaaatttacaaagcaatgcttcatcaaagagcaatattaaaattgaatataatataaacatgtaaaacagatacctttattcatctctgttttctatttacccattcccttgacaatctcatatggtttcacagcttaaataccacatataaattgataatcctcaaatctgtatctccagatcagacttccccttttaattgcacgtatatatatccaacggtccaccctgaacttctctgcggatgcctcactgacatccaaaatttaacgtgaacaaaaatgatctcctgatttttcccttcaaaatcatttctcttccagattcatcttaattttggcaactgttcccttctaggcgttcaactcaaacaccaaggtatcaccctcagcccctctctttctctcacacatatccaacttgtcagcaaattctgttatctcccccttcaaaacgagcccgtcctcctatctctagcactacccctctggaccaaaccaaagtggactttgcttggattacgggaattgcctcctaaagggtccttggctctgtcctggttcctctagagtctattcttcacataatagctaaaattgtcttgtaaatcgtcttcgttaaatgtgtatcaggtcctgtgatgactgcttaaatcttaccagtggtccaaagagcacaggggccagggcagattccaaagccaaccaatagtaagggagctgacagagaagctgctgttagagctgggttgggggcagggactcttagtcgggagactcacagagctgtgagatgacctgcctggtgagccaggctgacttcacacttcagcgaggaatccccctgagcaggcgccacccaatggggactgctcatctagagaacagaaggctgtctgccaagaatccttacacttcaagacaatgccagctcttcatccatctccctcaacacccagaaagggcacaaagaaggtcatgtggctgaggaaatgtcttcttcaagagaaaacaggcatgacatcaagtgactgatcactgaatttggaaggccaacacaaggatgggactttttcataaatgtatacaagggacatcaagattaatatctgaaaaacagaatttttcagttattaatagaaggtttttaaagtattcataatacttcaacatccattatctatgtttacacttacctacttttaattgacagataaattttaggcacagatgttaaaggaatttactatattcttatagaaatgagtagcagaatatggattaacacaggtctcccgaattcctggcctattcagcatttaagaaaagtatttaaattctaaatatatctgataattagaggactattcaagatgattttaattttgtagtcttgtgagaattaactaaaaactgaggtctaaataaacaagtgtggcaggaaagaaatcagtgtctcgcctttttccttgccattttcaaacatctcttagcaactaatgaatttgaaacaaccaaattttgtgtgtatatagattgaaattaattctctagaagattaagcaaaaaaatcatatctagactttaacaatgagatccaataggttaaaaaatgaaacttagtataattccatttcaacaaaatccaagtctcctggtatagaagcctgggttgatgaggacacattttctcctctttattcctgaatatcacaaagaaaaataggaaaaataagtcctaccttcttccctctctgccccgagaaaaactatttttttctaatcatgagaaaataatcattaggaaaaaaaactagggtatacagtgagatatttgggagtcaggagaaaaatttgatgaggagtaacagtattaacaggttccaaatacataacatagctaccttggtaatggcaggatgaaaatagggcctcaaagaagcatctctgaccctgcccttctctctctctctctccatatatatatatatatacacacacacacgtatatatacacacacatatatacacacatatatatacacacacacatatacatacatatatacatatatacacacacactatatatatacacatacactatatatatacacacactatatatatatatatacacacacacccctttctatatatgtatctacctatgacaagattcagttacaaacctatcaatctgtctgtctgtctacctatctatctatctatccatccatccatccatccatacatccatccatccatccacaagcagtaggaactatatatatttctacaacggggaaagcactggtgtgagtgggaaggaatttacagaactgtgattccgaagaggctgggtaaccaagagaatcacatacagtggagccatgtttgcaggaagcaatcagtctctgtcagaaactgtcagattgtcaataaaagcatacaaaggtagactatctgaccctttcagatcttaccgccaccccaggaatctcttcacattaagtccaagaatatttaatagctttttattaaattatctaaaaataaataggatgactaaagtattgatacagaagaagtataaaacagtggcaaacaatagtaaagtttataaaatctatcaaacttattttattttattatttgttttgagactgggtcttgctctgtaccccaggctggagggcagtggcacaatcacagctccctgcagcctctacctccctggatcaggagatcctcccacttcctcaaagtacctggtatgacaggcacatgccaccatgcccagcatatattttacattatttttgtacagacagggtctacctatgtagcccaggctggtctcaaactcctgggcttaagtgattctcctgtctcagcctcccaaaatgttgggattacaggtgtgagccaccatgctaaaccatacaaatctatcaaaattttaaaaaacatatataacgatttcttatattaacaatcaattatcactattggtaaaattcacctaaatatacataaattggagtcaacttaacatgataaaacacatctagttcaccactaaaaccaggctgattcttaagcaggaatgaaatcttagaaacatcactcctgaagacaggaactagaaaagaataactaatattcccgctgtcaattaatattttacattaagtactagctaagggaatttgaaaaaagaaagaaaaaatttataaaacatgaaaaggaggagataaacatatagtacgattgaattttgatattattttaaactggaaaaccaaataaaatcaatttttaaaaaatctattttaaactaagaaagaattcaataggtgacaggaagtaaattatcataaaagactagtttttctattaaaaaacaaccaattttataaaagaaaatactctttttaaagcaatagaaacttaaaatataaggaaattaacatgaaatattcaagaccaaatttttaaagatataatactccctaaaaagtaccaaaatgtaaatgaatgaaaatacgtatctttgaactctatgacattgtattaaaaaatgagaatgttcattatacactgacaggaaaaatgagaacgttcattatatattgatatgaaaaactttgaagatatgtaggtatgagaaaaaaggaaaacaactgaagtttatattatgttttcactggtgaagaaaaaaaagagagagagctagaattttgttttaatgtggttggtttctgcacaaagaagctctgaatgatgaacaagaaactaaagacaatgatggcctggagaaaggcaggtgaaaaaaagactacacagctagagaaagtgcaggggtgggggagactagatggcacacattgtcatgttttagattttgcattttgtgcaagttatcttcaggactaaattaacaaagtagataaataaatgaagcctaataagaaataagggttttctaatctatttccttctctctcacgtgccaatgcgcttgagcctgctcattctctttctctccctcccttcctgccctataattctctgttgcattaaaagcatcattataagtctcaggcatttgctgcttcctttcttccagaaatggactctcattttcttcaagcgcattgtaagtaatttagtccccacccccacctacaaaaaaaaaatcttcacaacaaacttatttttaagaattattgcatcctttctaagatagcatagaactttgggatggtaaggtcaataaaaacttgaatccttttcctattttgttcaaaagctaaatttccatttatttgtacttccagatgaaagtaatttgatttatgtatttcagtaaaagctacccagttttaaattacctaaagaattcctaatatgcacttacgattttcaaagtacaaattattatttccctttgagagcttgaactattgctgccttttactttcataaataaaattttatctcattaaagtagtataaaatatgggaaaggactccctatgcagggctcacatatctatattcgacctcactttttattgattttaacagttgttgatagctaatgtcacctcactttaaattttttgtctacattttacctacaaaataatcagtcattctcaccaagtttaagtgcttacttacagatcattaaatattttaaagaaattattcctgtggtgaggctttttctaaatgaaatattttttatgtaaaataccacctcttaatctgtggtttggagtttttgtatttttgcttcacaaagctagacgtatacatacatataacatatatatatatatatttatatttcatatacttttgttccttgatgtttcttagtaataatatataaagggaatgtatcatttttggaaaagttggaaaaatttttccaaatatcacagaaagcaatgtgaaattccttcttctcaaaatctattgcaccagaataacatggtaccatgtattatctcaaggaaaatatgacaaactatattaaatgcaaaactatcagctactacttctcatttgaataattttttttgttttttgagatggagtcttgctctgtcactcatgctggagtgcagaggcatgatctcggcgcactataacctctgcctcctgggttcaagcaagtctcctgcctcagccccctgaatagctgagattaaaggcacatgccaccatgccaggctaatttctgtatttaaatagagacagggtttcaccatgttggccaggctgctctcctctcgaattcctaaactcgattgatccacctgccttggcttcccaaagagctgggattacaggtgtgagccaccacgactggctaaataattttcttatttggaatatttataaagtttctgaaaaatcatcttggtccatactttgtgacttagaattccatctaaagatcaacaacggccataaggaacacagaaggaaagtctagaagccaagggaaaaccaagatcctagtgccgtctctggtacaaacatacctggtgaccttgatcaaacatcttaactttcgtgaatctacaattcaccagctcttaagcttgccctgcctacttcaccggaagacaatttttatttgaatggaatttaaataaacagttaattattgtgtttatagcattattcataaaaccactctaataataaacctctcaagagtaacatgagggttaaggaggaagtatgaaaaaggctttggaaacttacaaatgcaactcggcaataaagttcttccagcaaaagactaatcaaattaaactattgcgatccatatactttgtccctatccatgtaatttactgaaacataggaattgtgttttcctcatccatatttcctcatgcctagtatcatgtttaacatatagaaagaagaaataaatacatgtgattttgtagttggtgggtttgatgagtagaacaatctctttttattctactgcctagtgatagacaagtataaactaagaatcatcaaatataaaaaagaatgaatctgactactacaaatcagattctgaacaatttgaaatacaaactattctggaagatgctcaacatcacttatcaccagggatatacaaatcaaaactatgaaatattacctcacatctgttagtatggctattatcaaaacaatgaaagataaatgttgacaaagatgtaaagaaatgaactgctgtgcactgtttgtgtgaatatagattggtatagccaataatggaagagtatggaggttcctcaaaaaattaaacatagaaatatcatataacccagcaatccccctgttgtatctaaaaccaaaggaaatgaaaccagcacctcatagaaatagctgcactcccatgttcactgaggtatcattcacaatagccaaggtatgtaaagaacctaggcatccaccaatgcatgagtggaacatgattcagctttacaaaaggagatactgtcatttgtgaaaacatggatgaaactgaagggcattatgtcaagagaaataaaccaaacacgaaagaaaaactagaatttatttcatatctataatcttacaaaaacggaatacaaagaaacaggagaagaacgatggttattggagtgggctggcatcgaatgaggagatgtcagtccaaagtatgaagttgaacttatgtaggatgaataagtcaagaaatctaatatatagcatgaaaactataggtaatagtgttatgttgtatactggaaatttactaagagagaagatgtaagatttttacacacacacacatgctgactatgggaggtgattaaatatattaaatatattgctttgcttgagtacacttatttgactatgcatatcaagctatcatattatattccttaaatacagactgcaagaaagagaaaaaaattgttttggtgaagaaaatatatttaatatccatgcagattttaattttatcaaaggcaaacttaactaaatatggctacttctcccaatgctgtgtatctcttgaccgagtgaaaagtgatgccttctaagtgaagtgaaaatgcattttgtactgcagtctgaagtcactatatcctgcttccattaggacttgggaggattgctgattcttcaggagtatgctctgaatggggtagaactttccaaatgcatcagatagttaggaatgtctgtgttccttcttggaggagccctgaactacagggtgcataagtccacaggcaatgtaatagtctcagcatctcattactatcctcagcggaaaaaaaaagtttctaatttttctaatttgaatatgatgtcagctgatttttacggaaagaaaaatttggtagtcgtcaggaaaattacagtcacttgaactcaactacttgaatatttcaggaatacttgttttcttctacctcttaacaaagtcataaatactactggaatgacactgctttagatatctcaacaaaaaaagatttctcctctgtgaaatacaaagatcttactgctattttctatatccagctgatcttttcagatctaagctcggtggggtttcagcttagagtgctaaggtatcatttttctttacttgtggcattacaagagtctcactgagacactgctatgtaatatcttggcaaaacagtattgatctcctttcaaaagtgaatagaggtcagctttctgtctggatacttatatatctgacttgtacacctaacaccattaaaatctatttgagtgcattagtggaaatggattctattatatggtctcatggggaacccgccaggaagtcatagagtataacgtagacggctccttttaaagacatttcaggcaattttcttgccatcccttcacttcattcccactggctaactgggaatcatccaattactacaatagccaggattgatacccgggagttagaagaaaactctttcaaggaccgaggttcgctcaactcatgaaaaacatgttgccatttctgaaaacaaaaagagggtttaatactttggagtacataataatgtgaaatatacctgatacttatgattcaagtcactaaagtgtgttacctgacaacacgtccattttgtatcttgtaggatctgtgtatacctgtgcataataggaagaaatttattttgctgaaagtaaataccaaatattgtaaattgtatgaaaagaggacatttaaaaagcaaataataattagcagtttgtttagctaatgaccttacatatgtatctttctcagtttttaccacatttttgttgaatttctgatgaaaatgtccaggtatacataaataataatgaaaggaattttcatatgtgctgtaagaatctaaaatgtaaatgcaatatgctttcgaatgtaaaaaaaaaaaaacaaaaaaaaaacaaaacaaaacagtgcctgaatcatggaggaccttgtaaggtgttcccattgccttcccaaaactaactgtcatagggaatgagatttgtcctgcatatacagatctcttcaaaacatactttgagtaacttgcctagataagtgcatccaatctcgggcagaaagaacgtgaaaacaatttttaaaaatatgatgctctgtcatgaccattaaatatcaatcactgaatgattcttctagtactgaaaatagtttaaacaatctatatgcacttaagtgagccattgcaatttgtcattttcctgtaagacaactagacctcctcttgcaaacaaaataaaacatggatgttccagaatgcttttcatgagttttatgataataattatagtctcaaaacaaaatattaaccttgcagttttaagaacagtattatcaggctggctaatgaatactgatatataagctatgtcaaattgtgtgtaaacatagggttatctatatcactactgattatatgaagagctaataatgcccattaaaatataataagattttctagttttcttataacccatgtggcataccataaagtaaaatcagacttaaatatacaaataacagattcaaatataatatttacattacttataagtagctgggagttcatctttataagtactaatatagtagctctttatatatatatgtgtgtgtgtgtgtgtgtgtgtgtgtgtgtgtgtgtgtgtgtttatactcccagtgaaattctgttgaagaagaattgacataatatattatgtgatattatttggaaaaaataaatgtaagtttcacacagacattgaataaacttgctttgtattttaaattattgaacaccattctaaaagatgtatcttggtaagattaatcaacgattagctcttgaagcatttatcacgttttttaaaagttaagatatacagcatagccttgtagtatgaatcaagttgatatattcaagttgaatatagcctgtatgtttaaatttgaaatctgacggaagtatacttcactattaaaacctcaactataatatgaatgaaacaaatcatacaggtttttttcttttaagaaggttgttacagttgtataaatgattcgagtttaaaacataagcccataacattttggttgagggaaaagtcgtgaaagaacacgttttaaatatttatacttttgctattttaaacataaaaggggaaatgtgtgacttttgccatttgcgatccgaacttttcaaattaaatgtatcctgaaaggtatatatgttttacacattataaaagtgtaccttttataaagaatacattaaaaacaataaaagtcagagaataaagatgaaaaggttaaatttaagtcttattgcaagctgtttagtatcacgagcaaagtatcgaacttcattggtacatgaatgaccaagatctgattacttttcttcaacaccatttttcctaattagcattatcagcatccagttctagaaagtcctagcaaaattaattacataatagtaatgttgttttgcttgtgaaagcgcaataatataaacaaagtagattatttatggttgttgttctccatttctattattttcttaatttgatagctcagaaaatacatagttacgtgagctccacaagggcatatcgcacagagatttccattttgcgaactccattccaggatatttctagttttgagacctacgtgtatttcagaagcaacatggggcgcgtctcaaatgtccactttttaaagaagcctcttgaaaccacagctcatcctttcagaatctgcattctcagacaaattccagccttgcttttggcatcttgaagaaaatccccatttatctcagataacagagaaacaatttgctgtgcttatttagtagctggtaccttgagttacacaggatttgcgctgcgtttgagcctagctgctcggttggaactgagtgtaatgttcacgacgtggctaaaggagttttgagacctaccctccgacatcttgtagaccctggttgtgggactgggttcacattccagggggggttactttgacactctccagtagatacacggcattcgtcaagaagttattaggatttacagtggaattttggtatcacgaactagttgtaagaattttctcataatggatttttctggtcacggtgtgagttcacatcgtggacagttcaagccactgacaaatgatccgtgatacacagaacgcacatataacacacggggaggacaagacgtcatctgggcgagccatttgcatccagatgaatacaaaacctacagttggttgtattacacttggaagttttcagctgtggcttcatcacccatattagggtcagaaaaactcttgtgtgtttctacagccttgccccgcttctttgatcctttgtagtaatggcgactaagtgggtagcgggttctttaaaaaaaaaaaaagctttttgtattcctgaaagatagttattatcaccaaaagctttctcttctaatgactaaaaatagagcactctaccctttagtgtagttcacagaatttgtttttaatactccagctctttgtgctccttaagtctgcttcacttttttttacttcgtttttcaaataagacctcaatggacagggctttaatgagaatacaagcagtgctaaccagagggacaggaccacttccctgtctgacaggtgagacgtctagggcctcccatcagcttctgcaaaagatagaaaccctgaatcattatttcaaggtacttcatcatcctccctcctctgttgctctgctgctgtcctatttcatcagttctaattttattcattctccttctggaactttcacttcagcatgggctgggttatgactgcatgtcctttcctatgttctggcttgtattaaaaattgcaataacacaacaattgacttgaagatataattgacctgaagatgcaaatgacctgaaaagctgaaatagtattgagtttcaaaaacattattagaaatatgaagagctgaaaaaatagctttttatgaatttcttctggggattgtacatatgtacttaaaaaaaatacatggatgagatgattaggatggaaaatgagacccctatatgtcatactggaataccagcagaaaggtcatccaactgttttctaaatggagaaactgagattgatgtcagggctttctaccggctgagtagggtgaggaagctgaggcccttctgcagctgaatgtaacttctgcggggacacttcgctctcaatccaccgtaggccagtagctctccattctctctgagaaaggactgatcaatgatgaagagtccactcagcagggcacccaagcatttctgttttcacattaaaccagttaatgtctaccggtgaagtctgtaacaataattaagtaatttaattaagtgtttgagaaacccatgaacaaagaccatgaaataaaatgttcacaaaaacactaatgctctccattgaaagctttggaaaactccataagtgcactacccataagtcagtccctggaattatgcgtaagatagttctaaaagactggggaaaacaataaagagagagaatgatttggcactttcaaaaagcaagtgaaataatgccttctgggtgtgttttgcaaagaaaaatggtgcagaactccactatgcagatttattttcttacctaacgtcttctagctgttaatgacttccaagtttatatttccgtgatctggttcccacttgaaatccacggggaccagctctactagtcacctggaaataacttgcaaaggcaaattcctgtgttctgccagtaatcttcctctttcctctttttcttctctgaatctcagttaagggctgctctctgcttccaggtgctaaatttggaatatatatgtttggtacatgtatatgtttgggatatatatatctattatatatacatattggatatatatttagcttatatcaccaatatgtacccacctataccacatatatatatataccaaatacatctaatatatatatatacaaaatatatatatgtatatatatacaaaatatatatgtatatatatacaaaatatatatttatatacaaaatatatatatattttttctatttttttggtttattgttatatatagagagatgtagaatgtatatgtttgtaggtaaatatgtacatttggtatatttggtgtatatatttagacataagatcatacctatatatcaaatatatatattttatatatatatttatttggcatttatatattcgtatatttatatatatatttggtatatataagtgtgatcctacacctaatgatatgaagtaaaatgcatgtatatgatttgggttgaaataaaattttaatattaggtgtttatatattttagtggttctctttttaaaaatgctcatttgcttaagtaatttggtcctcattacatgatataagggacgtatttaggggagtttagtttggagactataaattcctgagggtaagaagcatttcagtcttgttaccaattgaacgtatattgcacagcagagtgctgccatgtagcaggttctcagcgactatttactaggtgaaataaataatctcccaatctttagcttatttggagctcttcatgtctttattcagctctgttactgataccatttaacacatgtccttcctattccaaataaaattcaaagacccatgtatgttagagaatcttaactagttaatattgcttaagtggataatgcttccacattgttttacatatttctatttgtgatcgtatttcagtagatgctcaattaatatttctaaatgtctgctgaaaaaaaaaataaccagatgtctgctgccacctaaaaaactcaaactcctttagttcaaaacacctcgaaacaaaaagctggcatctactgagattaataaaagaggggaaggggagaattattggagggagaaagaaggaatttgtctttgagcattacaacgttaaggtaacctgccagacgtccatgtggagatagagatggacagctgcattttagaggagggagactgtggtgatataaatctagaaggcgttagtatacagacggaaagagataaattcactgatgacctgaatatagacaggaaacacttggatgttcagccctaaattatttccatatctgaaaccaggacaaggaggaagactaaacaaagaacacaaggacaggctaatgagacgggagaaaaatcagaggtctcaggaaacaaataaaaatgctgtttaaataaagagggcattatcacagaaaattatgctgacgaggaaagaaaataagaataaaaacccgatcattatattcggaaatgcagtcatcgatgatccacacaaaggtgttttgttggtgtggaaattctgaagacagtaactgattgcagtaggttcaagagagaattggaagaaatgaaaaaaggggaaaaataaagtatccacaacttcttcaaagagatttgcggcagaggggagcagagaaatgatcaatagctgaaaggaaaagtgagtcacacaaaagttttctttaaggtgaatgaaatacacataatgcatttttatgctgttgagaatgatgcattaggcaaatttcgatattgctagagaaacatataaaaaaacaaaagacgttaatctgtgagcaggtgagaaaggggggaatgcaaactttgcatgagtatctatttggcaacagaagactagctgttgtttgaaagttccagtggcttttcaaagctgtgcttacaactcaaagttcctataaaactgtagggaaggatctcataaacaacttaacacatggatctatgtataatcaataatgaaataaaagttttccattgcaatcacagtaaaagcaaagatactcctaagtcctaatctttcttttgaattcctaaggtgataggaacctcatctgaaacttcagcgggagttttgattttcatcctttccatggaatgacttgtgcgcacacactgcagcctaaacacgggacaaatcacttctcctctcccgattctgaaactcgtgattcagagcacacctgctcccatgttaatgttttaactcctctcagaatggccagagaacaaaataaattgtatgacatctttattaccccttttcgtctccgcacttagaagcattgagaagtacttggagagattcccagaatgcaaagcatggtctcagtgtggaaaaagaaagggatggaaaagagggagacagaagaaaacaaaacaaaacaaaacaaaacaaaacatatatatatatacttttttatgttcagggaactcagaacaactgtgaagacagttcattaatcaaagacaaattcagttcaaagaaatgttgcaggctatatagaaagcccttgaaagatgaaaacatattcaaactaaatttgtaaatatgggaataaaaagtagttgagttaggtggggtcattcaaagaataatcagatttaagaataaagaaaatggccaggagcagtggctcacacctgtaatcccagcactttgggaggctgaggcaggcggatcacgaggtcaggagatggagaccatcctggctaacacggtgaaactccgtctctactaaaaatacaaaaaaattagccgggcgtggtggcgggcgcctgtagtcccagctactcgggaggctgagacaggagaatggtgtgaacccgggaagcggagcttgcagtgaggagagatcgtgccactgcactccagcctgggcgacagagcgagactccatttcaaaaaaacaaataaaaaaaaaaagaataaaggaaatgaataaatgaatagagacggagaagttgctgattttcttggtttttgtgcataatgctttatctaaagaaataagagccgtaacgagaaatgtctcccttgagaaaggctttcctgtgactaaaccgtgctttgtttccagtcattcctgaggcaaccagggccagtgttcctgcctattggggtgattttactcatttaggaaggcttgggagttctatgtcatggttttaaagttctaggcccaagacgctaacgaatgaagagtatggagggtctgtgggtcttgactcctgctgagagagaccattaccagctgtaacctgcttttgatttgcccatatgagaaaccatgagatggcttcgagtagcatttaactttccgagctgtaactgaaagttaaagagaaattccactactgtttggaagcgagaatcagtcctttcccactcagcctccacacaagatgcccacctcaacctgcttttgtcttggttagaggccaccttcctcatgggatccgtctttggaatcagcagtttttgctcccacctcataagcttaccggccattcagggactggagcaagctgcatgtgacacattcccccacctgtgcaagtacttttcatatttttccgtattggagtatcttggtcatttataatttatgatttcaacttgaaacaacttgccttggaaaggagcaaatattcattcagatatatgatgtcataactttccatttatctatttgttcttttgttcattaattattaaatacatgtttattgaatattttgaggagtgtgaggaataaaactgaataaaaatcaacccatccctgcactccaggagaaaggtgggaatgcacactttgcatgagtatcatttggaaactgaagactagcactgtttcaaagctccaatgggttcacgaggacccaggaacagcagccacagcagttactctagtagtttgggaagtgatgctggcttctaccacctactctatttatttagggttgggcgaacaactcacagtgtttttcttattgtgtatattgtcttctcacatgggctttagtactgtatttttattctaactgtctcttctaatattacattcttatagggccaaagataaaaataataatagtgagaacgatcacaacagcagcagtattaacaagaatgccagcgttatgagaaggaggagagaaaaaacgagaagactgaggagccagtgttgactgcatgcctcccccatgcccgtagctttacatctctcttgctaatctttccaacagtcccgcatccttatcttcatttcacagatggcaagtctgagattcagaggcttctaataatgttcccaggacccagtgtgcaaaagcgttcggtagcagaccgcagacaagaactcagatgtatcagaccccatgggtagaactctttctactctaacaaactgcatatggtgtaattgaaagacactctgctagattctagaaaccttaatgttaaattaagacacctgaagagttaatagatttaaatttcttctgcgtgtgtgtgtgtgtgtgtgtgtgtgtgtgtgtgtgtgtagtgtttttcccctgagattctcactctggacatgcagaatccaagcatttattctcactcacaagtgcttaagaacaagaattacttacaagggcttcattttcaccatcgattacttttcgagtaactttgccaaattccagtcttgcaatgcaattgaattttatttgtactaatggaaagcaacctgtcagagaagcactgctttcatgaccaccccagacagcagaagacactaaatcaaggcccctgggaatcgtgagctcatctgggcagccacacatctgccccagctgtatccttgctctgactaagcagacttcccttgtagtttacatcgtttttaacccttggcttgataaagactaagcaggcattttatagctctaattgtgcccaaatcctccaggatttagtaactccaggcagtaaatgagcttggaacttctttgcaggctagttgacatccacactcattcatttagcaagcatttatatgggccctaaaacatgtccagcctgctgggatggcagaggagatcgggaggcagcaagggcggagaaggagggaacaggtgcatttgtacctcagcacaaatctctagggctacgctcctctttcatttgcacggtttctttggaaaaaaaaaaatccccaaatgaaaaataactagaaaaaagaccgaggttggtatttaaaatgctgatattaaagcaaattagaatagaaggcaaccattcattccttcatttccttcattcatttattcagtcaatgtctaccaagtactgaaaaaagcgaaaccatgttgaacattacattccaaaacagactaattcaaaaagttcatttcctgaaccctagtatttgagaaacatcaacaatatgcagaaggaaaaataaatgactaaaaatgttgccctcaaagcaagcacaaattagccatgccaatgaccctaactctaacaagagccttttaccctagcaggttatagtgactcatgcccagaataaccatatcttggaaagaaggaaacagacatagagggaaggtaggtgtcggagaaggagctaatgtctactaaaatctattacaggactgccagttttacacataatcctctcaatggtgcaacaaggaagatagatagtgcattgcccatttaaactgacaaagctatgtggtgtaagacgttaaataacttacatgtttcaacaaaggcctggaaagcatttttatccaatagtctacactgcatttttaacacatctgaacaggtattttgttcactgactacctatttttcctttctcctatctatgacttaacaaagaagtatgtaggaacccatgaaagtaaaactggtaaacaaagaaacaaacttaacaacaacgacaaaatccttcatgactactactaaattatggaaaactgccttattttattatcactgaccattacaagaagtcaatttatttctatttctgaaattgacctgggtagctttttgaattctggaaaaaaacagacaaggatagcatttatggtaattagcaagaggctgtatgaagttagaattatgcccctatgcatgtgaagtgaagattctcttatcaaagaaagaagtccttcttacaaaaatattttgaagaatatcttaacatatttggagaaactgaggtgacaagttattttttattgcattgataaacatcaaaagagtttatttttatcaaaattttcatttacatttacaagctctattgaaatataatagagcttgtactgggacatttaaatatgtttacctggaaaattcccctgcatggtataaggatgtgttttgattttctagctttcaagaaatctattaaatccttttaaaaaatgtgatatattgagcagtactaaaaaagcaaattattgtttatggatgtgaatttcacagtatagcttattatatagttatttagagcttcctctgagtgttctatgcatgtttgtgcaatttttcttttgtttagtgagtccctgaaaaaaaaaggtgaaaagttgaataggaattctgtgactaataacttttcttgtgtggccagaagctctaagatttttttatttctacaaaataataactgttgaagatttagaaacgtatttggtagcgaagtataagtaaatgctgggtattaaattatatgctgtttaacaaaatacaactatactgtataacattatatttttaggtactggaaatactttttttattttaacaatgattcttagctcttacccatttgacatgagtgggccgttcaagcaaaagatacatctattgttttcataggcaaataaattattggctacttctttgaagatgttctgctcatgccatctttactctcatttttaagacctctcaaggacctgggtattttcagtcttggctctgtggactgaactctccttggtgaagattccatgtgtgtttaccccagccagcagcaggctggccacagtatttccttctcctaggaggtctggctttagcaaactactcgttatggcctgggattctgggaaagtttccatatggatgttataagatgttgctgagaagtgctcgggttgtttgaaatcacatcaaaattgatggagaacaagtcagttcagtagaagcaaattgctgctcgttaaaatttgggaaagtttccgcagggaagagcaaaaggtattttggagctggtattcaggatctttttatacatatgaggtaatgctccctcaccaatgaggaatgcccccttctctttcagaacctttattgctaataccaaatgcgagaggatacttgagtcatctcagcactgaaaaagcctaaggtcttctcatttagatttcactagctttttaaaccacatctccaatgccagctaccaagttaccaagccaggatctaaacctggattttctgttgccaagcccattgtctttctctcatcaatttatctgccccaaataaccttcttttttcagtaagggagaggattattacgtagatctgcaagtgttgtaggacgacagatttcctttcaaacattgaactttatgcaacattttaatgcaacttacattaaaggtcagaataattcacctttttaaggtctcttccctagaagcccacatacagctaagaaaagaagtgaaagacaattactaaatataatactactagcaatgatgatgagaagactaatagaagctagcacgcactgatgtcttccatgtgccagacacttatttgaacacttgacatcttcttgcttttatctccctaatatctccctaataagagaaaaggactgttagtcttcctagttgtcagccgaggatttgaattttagaggaatttttccaaggctgcctagatcttcaatggtggttctggaatctgaactgaggcctttctgattccagggtccaagatttacatacaacacgctactgctttactagagatttactgatgagcaggtaataagtagccaccggttgcaacataaaaatgttatcctatttaacactttcctgaactgagttcatagcttgattttcttacatttttatggagctgctggagacactcaggctattatggacatttgtattgccctgtgttagccttcatgaatatgcctgattttcattggaaagctttgtttctcacgagctgtgaggtgtttcttctactggattaactcattctgtcaccctaatgctttcaaatattaacttcttctctatgtttaattatctgtgcaggacagggaaaaatgctgtaaaaaatttaaaaagagacgtaaaagttctcacactttttattttcttcaggtcactgcacactctgttgtgtatccaggaaaatttaggtagttgattattcttggagatattcagataataaggagatcacaatggttggaggtgccaagaagattccaggagagagagagagagcaatgatttagaaattggtgaatgaatttgcatgaacagagagaagcagcaggcccctcaggtgggcaaatacaagaaaaactaaagaagtcagaactcagatactcaagcatacactgcggccatgacagcatgacagctgcgggaaaaccccagggaaggtgaacactcaatctaggaaaatgggtttgcacatattgtactggagctaaaaggcagggaaaggcagtgacacctaattatcaaaaggaatgatttttatgcataacttttgagaagataaatcgcaggaaaaagaataatttaagaaaaaaagttactgggagaaaatggtatactgcaaactttggaagcaggtttcatgtttgtgtccccactctaacacttttgtataaacaagtgccttcacttccccactgtgctgtctgatttgtggggtaagaaaatagctcctacctaatgcagagctggtatgtaagcgttcagtaaatgttatcagctgtcatcatcatcctctttgtaataattcctggggctcagtcacagcaaaccattccattatttattctctcatggctgcttctttatagcttgatttttgcatttaacattctatcataaagacatatgcacatgtaagtttattgcagcatgattcacaaaagaaaagacatgtaatcaacctacatgcccatcaatgatagactgaataaagaaaatgtggtacatccataccatggaatattatgcagccacaaaaaaagaatgagatcatgtcctctgcagggacatggatggaactggaggccattatctttagcaaactaacacgggaacagaaaaccaaatagtgcacgttctcacttataagtgggagctaactgataagaacacatggagacatggggaggaacaacacaccctgggatctttcaaagggtggagggttggaggagagagagagtcagaaaaaaaaaataactaatgggtactaggtttaatatctgggtgatgagataatctgtaccacaaattgccataacaaaaatttacctgtttaacaaacctgcacctgtacccctgaagttaaaataacaattaaaaaaaaacataaaacatcattaccagacacatgattgatgatttcccttatagacacggaagttattgccagcaaagactcaccttcttcatctctatctttatactagcactatattttacacattttttaccaaatggttgagataaaagaaaaagagacaggttggatgaatgcaaggaataaatcatttaattcggctgctgaagtacctaagcaataggtaatggcttaaatcaatgcaaaggcaatagaaaggccagagaagacatagaaacaaatagttctttggacaatggtagcatctaaagtaatgggcagcatatggtaggaaagggaggaggagtcaaatattgcaacccacaacaacaaagttaatcccagataataaggaaattgatagcaaaatttgtttgaaggaaaggcgagaaagtaaattatgaaatgttaattttcaggtaacagcctgccattgaagcaaagtaatgatagcatatcctttctccacatgtaacttggagaatgagagagaataagaaaagtggtaatagtaaaaacaaagataagattacatgccaacaccaggtgaatgggacaacagtaaagacacacacagttttctgtgcaaggtctcaaacagaattaaacagaatatcaggttagtttatttggtttgatagactttcaaatagtccgtttttattaaaaaagaatgtccctacagtcaaatatttatccatctgtattagttcattttcacgctgctataaacaactgcttgagaatgggttatttacagaggaaacatcttaattgactaacatttcagcatgggcgaagaggcctcagaaaactttcaatcgtagcaaaagggcagcaaacatgtttttcaaatggtggcagaaggagaagggctgagcgaagggggaaaagccccttataaaaccatcagatctcatgagaacaaacttgctatcaggagaacaggatggggaaaatcacctccatgattcaatgacatccacctggccactcccataacaggggaactacaattctagataagacttgaatggggacacaaagcctaactatatcaccatctagcatctgtattttaaatataattacattttccaacagcatcgtttctgtcattttttgacaaagtaaaaaaaatcagtatattatataaattttcattgatatattaattaaatttgctgtatcataatgattaatggtatgcatttctgaatacaggattaagcttgatacaataaacaaataagatggatgcccctgtctgagttcaactacagatggagaatagaaaaaatacacaggttgcttatttaggaactacatatagtcatctattatacttaaaattctgtgtgtttgtgtgtgtgtgtgtgtgtatgtgttagaaggcaatgtccaaaattttgaagggcttgaataatataccttctcttgggaaaataatcttaagtcttccatgctaaaacaagttaaaagttaaaggaatgtagtgtgagtaactgatatattctttttaaacacacacatgtgcacacacacatacatgtgaacatacacacgtgcacacacacatacatgtgaacatacacacacgcatacacacactttacttcctaatagctcattttagatcccgtgtatttgttcaataattctatctattaaagcaatcctatgttgttgagcctgccaagttcagctctgtaaatatagcaatgcagcaatttcacttggaactcctacagattaacagagcatagccatagttgacagaactagatattttatggaggaattttaccttactgtaaacttcacaaatgttcagctcagtcatattccctatttagtggccttatatctgatacctcccaactctctacaatataaagagaaaaggtcatgtgaatattatctaattgaatttgttgtaatgatagatgaagtaacaaaacttttctgtgctgtgactcaatgataataacttaaagaaaatcataataagctccagaagatcttttgactctaaatgagaacaggtctcctttgggtccgagaaacccacatgctcagtggttatcatggcattaacacaggaagccacaggcggacagtccacactttgtgtctatcactttttgtctagcattttgtgtctagcactttactaggagctcgtggtggtactttgctccctatcccttcccacaaagattctccagtccctctctttggagtcctttttcttacctgctgcaacagcctcctttgtgatctttccatgtctggcccccatccaccgttcctactcttcccagagggatctttctaaaactcagcattgacagccgtttctccaccctcccttcttcagttgctctctgcagcaacttaagctccatagtctgagctagggaaatagctgactggccagccgcctgcccaggcatcttcctttcccaccctgagcttcagcatcctggcagaggaatgccacagctctgggaatgatctctgagaactccaagcagaatctgatggctctctgtctctactgccattttatctgtatctccatcataattccctccctgcagggatgactgtgcaatgagagcctgagcaccctgagacgaacacattatcttattgttttcaccccaggaacaagtggaatcttagaatctctatgtgcaatttctgacataataatattagtaatagtctgtatttttgaaggtctttattatagggtcttacattttactaatgttgtgatatagctaacagaaaaagccatttaaatccaaggatttattgtagaaatacagtattagaatgaggaaatagcagcctctatttttttcttgcttactctgtttctgcaacactgaatgcaatcctagggtagagacaggctgggatgtgtttagaggaaagtgcaatggtaaatgacagaaattttctttctgtcttcaaatatggataagactcatgtgaaaaaggtattttaaatcattttttattatggtctcagatagcgtaacaagcaccaattgatgaaatgttgtggaagacacatctacgaggagtatgtgcagctctctggcttttcactaagaggatgagaatctactcaaggagggtgaggttgaagtgagccatctctgcactctagcatgggcaatagagcaagatcctgtctcaaaataaatgttctacctcttctcttaggtatattttcaaagcacaggtataggatatcctactgaagtttcaggatgaatcttaaagaacacgaactttaacgaacttcttccctgagacatcatgctccttttttccacaacagctaactttcctgactttaaagtttcaaaacaaaaaacacttattaacatatattaaaaacataattatttcttataataaaaattaacaggaagacacataaaaaataatttactagaaccgaaagtcctagtaattgctttaatcaattttcttcttaatccttatgctttaaggaatgaaaatattaaattggctcacaagatccatcctagtatctcctcttttccagagcaaatgtgtacacccttctttttcaagcacactagacacttatgtaagtgtcagaggcatttcaacagaagaccctagtgccacacgtgcagttcacttaacttttactaattaggcttaaagaagagcatctttgtgaaaatttattatatcacaatgaagatccttactgcattttaaaaacagggaatttttctctcagaccatactatgtctacattattctaattcagcatattgaaaggacactattattcttgccacaagattaaatactaaatgaccaggaaataactgtttttatttttaaatgttgaaatatgtaatatttatgtctttcataaacatacacaaatattatagtagaatccgtaagcatgatcaaaacaaaaataattgcatgttttgaataataagaagaatgaactggaggttttagatcttaacatgtgtctcgaggcttggacaacaggacctttgaggaacagtaggatgacaagaacacacacgagtttacttaggaatttaagatccgttcagtaaatcacatcttttccattgtcttcactactccaggttcccacatccctgacatagtagcttgttagaagtggagagtctcaggccccaacccagacctgcaggatgcaaatctgcttctaaacagtgccctggtgattcatgtacactttaaggagtttgggtgttatccttgtttttgagacaggatctcactctgtcacccaggctggagtacagtagcatgatcacagctcactgcagcttcgacttcctgggctcaaggaatcttcccatcttagcctccagagaagctgggactataggtccgcacgcaccaccacacccacttttttttttttttttttttttttttttttttttttttttttttttttgagacggagtctctctctgtcgcccaggctggagtgcagtggcgcaatctcggctcactgcaagctccgcttcccgggttcacgccattctcctgcctcagcctcccgagtagctgggactacaggcgcccgccaccacgcccggctaattttttgtatttttagtagagacggggtttcaccttgttagccaggatggtctcgatctcctgacctcatgatccacccgcctcggcctcccaaagtgctgagattataggcatgagccactgcacctgaccaaggctgaattttgagaagcacatctctaagccaccgactgtatcatgagaaatttaagactgctgttttaaaaataaatgtcctactctggtcatttttcttatgactaagattagaggtatttggtgtttacttttagtcattcacatacacgcacacatacatatacacacatgtacatagaaaatattttataaatatattatttaaattaaaaatctgagcatgtaagagaaatgtttttttatttagccattattatttgtaagttgaattccttttattaatactgcttctattatgcttggaatccaaaagcaggtagtgttaacatggagcatttttcagtgttgacaatcaggttggttttattaaagatgcaaatgtgaaaatggcaagtggcagaaagaaaaacaaatgtatggtctattaaatgccatgtcagaaatgctaaaagcccaattatataaatcgcagaaaatttttctgtagagcatttttatatatcaaattgcagttacaattctaacttaatggtctgtttataagagacatgtctatcagaacggttaaaaaaaatctgaaaataaattgtaaaaatgtataaatgataccaaaagtgcattatctacaactaaaggagaaacatggtcaactgtcaaccacatgcttcactgtgtttggagaattacagctattttctaagtgtttttgtttgtattttattacattaattattacattaaaattggctctgctaagagtcagtatataatctgaaaataaatataccaagaaaaataaccaaacttttaacagaggagatcacattcttttagacataatctatttcaagaaaaatagccaaacttttgatagaggaggtcacattattttagacataatctattttaaaatgtgtgaaaaatttgatgaaggaccaaattctaaacaagaaatatcctcaggtcagtatatttccattacaattctgaacactaaatggacaaaaaccaaacagcccaacaaaaaacgttcacaggatggaaattatcatcatgaaacacagggagtggtatcttcaaagcaaaaaatgaacgtgtgtcaagaatgagcagagtagagcgcttctcacgggccggtcagaaacaccggagcgtcaagtaccatgaacctcctgctttgagttcatgatgttctttccaagccagagtcaaccgtcattaaccacagagagtggctatcctgattattgggtcattccctggatagtcaaacgctattcaaattttacaagttgcttttccaatttacaccttaatcatttgtgagtttagttaatttgagtcaaagctttcttctgctctaaccacttctggatgtataaaggagattttctctgaactataaattttaggtacagaccttgaagttttgcctattacacttgagaggccttcgataccctcaggtgctatgaaaacctctttatcgcaaaagcaagcttcttgcggtccacttttctctgtccgttcccactcaagttctagttgctccctatatccagccaagccgattaaagctagaagtttataaaccacagcactttctctcttcccagagtgattccatgagatgacggactctaaaacaaacgtgtgttaaagtcacgctctagagcctgcatccacgccaggctggcacacgcagccccgtttttcttatgcggctttgatgatgattcaattaaggcaggtatgagcaggagctaatacaaaagctaatacgcagaggtgctcagggacgccaatttctttgggttccctataaagagcgtcgcagtccaggccaaacacagggactgactgacggtcacctctgcaggctcggggggcacaggcaagtccccacttggaaagtacagctcaggggcttgaactttgcctttttaatgtaacttcccttcttccattttgctttcctgagttctactgatgtgtgtgctgtgctagccacaacttctttccatttcagtgtttcgtattgtctcttctccaacctctcagttcggttctagcctgcgcaggacacagcttcccaatcctgggtctgcggcactgtcccaaaatgctctccataagtgaggaattatatttatttagcataggtttttctttgtgataatggtatatgaattacctgtctatatttagagtagctacctcaatgatttacaattcacacaaaataatatctttggttcgtggtagcaaaaattagccattttcataggagcaactctaacaatattattctcaattttgaaaatgaccagtctctggaccttgtcagatattattttacataatgcttttctcaggtcatggtttaatgataattatactaattagtgtatgaagctagggttcttgttcactgaaatcttgtagaatttcttcattaacttccaaggagtaaaaaacataaaacacccataagaaagtatgtttttctaatttagtagtctcagacattaaagttgaactgaattttttcaccataattctaatggctcagtatgtataaaaatccaaatcaacattttaaaaaatagttcttcaactatttcaaatcagacacatttgaaaacatacacttgtttcaaacatcaacctatcataataaacttgtgttaaattgaactaatatatattcttttttatataaatttagtttttggtcaataaaatctcgagaaatgcgtaagaatggcatgtcaaaatccatacatttaaatcaaattcatacttttaaaattagatttatcttatgtaggtaagttctaatcaatgaaaccttaattttgtatacatacaaagttatagctatccagttgtctcagcagtttttggtcctagagagaattgtatttttcctctggcagaaaattaaaaacactattgcagcctaatggattacactctggttttattactaagagaaagaaatgctatacagtttagttacaaatgatttagtaacagcacctaagctttaataagtattaaatataaatatgtagctctcaaagaatgactatgtatagtattgaaagaaagctctcttagatactatttaacactgtggtatcatatattctttcttagagtaacttaacattttaagaacccattcaggcttttgtttgttcatctgactattcacttattgaaatgtagcagacatttcttagatgctagaaataaagagagagagagggagaagtagaatgtagagagagagtagagagaagtagaaataaaagaaaaagaaaacacagattttaagctttcacaattcttagctactgagggctatcattaacttagcatactttaatggagtaacactctccaacatatttaaatctataggaacacgcatttttgaacttctaccacaagtacagtgagatgctagtacaaatgaggggtgaagaagatgcaaagaaaatctcacactctgctgtatagaagggcttctgagcttgatccaggctcagccacttccgtgcaatcaagtcagctaacttttgagccaccatttccccatttggtatctcatcggtacgctttgaagtacaggctaagaatcaagatatggtttagaaaaagaaaatcttctaaactgtaaaatattatgaaattgagtttttattaagataatttttgttactgtcagcccctcacatcagaaaccccgtgacttcacttgtgctcctcctgctgttaaattaagccctctttgggccctgtttcttgggctttgcaccttttcatccaaaattctttgtccaattccgccctaaaacccccttttccatggaatcaccgaaaacgtatggccaacaaattccagccagactagatcttcttctaggtgacgtacttagagcctggtgccctttttgaaagaattcactcagaatagcgactgtaggcactttggcaggggttcaagggctatggttttaagcgttagtccttttcattatcctgcaaatctcattttaaggcaaatgcagcattttcttcttgcgaatggaagtggacttgctcaccacaatatcaggctccctcaagaatgagtgattcgtgtctttatcatcggtgatgagagcaattaaaaggtctgttttacatgatcagtgaagacgaagggcttgcccaagtgagaatgaaggaatgtgatctattctagcgagcatgcattttgtccaccacagctgggtaggataattatacaatccaacctgggcagcacaaactatgcagttcatttatgcatctgctgctgagcacatactctgagctgctggggctaatccacaatccacctcggtgggagtcaccggtagaaccttcactacagcagcgaggtcattctgaaggcatcataccatcaaaagataactgtgtgggttctctctcagagaaaaatagtgatacctggcatgtgacatactctgcaaacaacattctttaaaagcataattgacttagatcataaaagaattgtgggacactctagtgtaatgaatctgatgattcaaatgccatcccaaattagagagagggaagaacaggaataatttctcaagcagggaactcgtgagaaggcggttcagagaagccactgagtagggagggcctccccaccagaatggatcaccatcctctggggctagagctgcctgcacgacacaggaatggcaggtgctttcggctcctgctcctaagaggttgaagagatttggccaatctttacttatagggggagaggaaaggagtccttgttttcttgtctcttggagaatttctaccttcagtaatgaacacagcattttattgagacatgcctttttcataagtagtattgaaaacaagccctattttctactctgaacggagcctgctcttctcatttatttcataaatatgaagaatttgctatatgatagttaatattctaggatacggttttcatggcgagacacacaactaacaagattggtaagagcaatacaatagtgtgttaaaaggtggtacttatgtcagagaaaatttaagcaggaaagagaagagaaaatgccctcctaagtagagaaacattttaaaacccaaagcaaatcactacactgatatttgtcttaatttatgatcctcctacggtgactatattgtcacctgctaaatacactgaatgttgtgcttctctctttattctggagttagcatcattatcaaccttctgctttatactcagttgttgattttgcatgccttgtggcacaaggcttttccacctaccatcatcctggtctctagatgaatgagatgccaatgtcctgtggcccaagcacatcgaatactgtgtaaagcctgggatagaggctaaaaaaaacatcgaaacccagccaaagcatcatttgtaaatgtctctattcatcaactgttcaggtctcttttctgtcataacacgcaccaggatatctgttgttgctttaagcaaaggataatcaatgacaaatacactatttattgcagaaactaccatatgttctgccttctacttaccacaccgtatattggctctgctgatgtattagtttcactaagttatccatcttccaaactctatgtagaagtagaaataaaaacagggcactcagctgtgcccccaccctctgttgaaatatgactgatgaaaatccttccttagaagaacaatgacatgctaccaaccaactcacagagaaaacccacaacatgtttctactccatcaccttggcacataaacatcatgctcaaattcctttctcttaaatggaaacaagaagaaaagcaattcaagcaaccgattacaatctttagaaagcacacaagcaaatcatcatcctttctacaagagaagccagagtgcaccatctgagttggaaatgtgtgcatatggaaatttgttttcttagcatggttttctgctcctttgaatactttttaaatctgaaactaaggaagtcacattttatttgctgctgcagtatcatatttatgacccaagtaagggtgaaactctggaaagtgtggctggctgtgcgtcagttcccattccttgttagtttctttgtaactgttcgtgaaacggtatttatcaaagaacagacatcaggattattgggttcagcattctgagaagactcacggggagaaatcatagtgttttcattctaaattatttattgactggaatgtctccagaatttaaatttttagtctaaaattcaagtttgtagggggtgaatagcccacacctgagttgcagatattcaaagaatactcaaagtaaaatgcatttttacagacttaattactggttaattattgaataggtatttagtagcgtgttagcatcaccattgtgaacatatgccccttcgggagagttcaccactgtgaacatacgccccttcaggagagttattcaacaaagttattccggtcctgttactctgaaggttctctgctgcagacactgggcagtaattctgcttccttaactcactacaattcttctaataagttctaagctactggcattaattaatattttccctttgtcacggtgaccagttctgacccaaaactgtgtgtgtgtgcctgtgtgcgtgtgtgtgtgtgtgagcgcacgctcgcctgcccatgcagtctccactcgctttgctaatttcactgccacatctaatattgtcatgagtcatagattatcacagaaaagaaaatctattgattgatatggattagaatattcttaacaaatctgaaaactttttcattaaagggttaaatgttatctttagagagaatatgctcattttataaattttactacagatttcttccaaggttacttttagtttgacattggagtatcacaaaatcttacattaaacgtaaaagccatttaaatgttcagcatagttgctaagcggtccttgatagtgtaaacacttcatatattctgaaggtgtttagaggtattgccgtttggccatggaaataaggttaagacccttcttgagaaaggaattccaagaaccattagtgatgacttgtggttagcacgtgtattattttatttttattttactctagacttctaaaaccatgcttgtttattcaggaaaatgtcaatgatcttgtacagaggataattatctgttcttggaatgtaccagcgtcaaaagtttcactttaataattccagtttagtaatttttaatttataaatttaccaagttagcaatttcaacttaagaaattcattgcaataattttaataattacatatttcataaataatatacaccatctagatgcattaaaatgtgtaagtctgggcctgtatgacacattgtttaaaccataagatgttttgctggtaatttggaaagccagggtgtggatttacggcaaaaagagaaatgcaacttcaaaatcccgggtcttgttttgtctctagattgtcaagcgccactaatagaaaattagccaaggtcttcatggttccctcaagtgcctgtttaataaaacccttgtttaattgaaaaaaaaataataattattattatttttttgagatggagtctcgctctgtcgcccaggctggagtgcagtgggcgatctcggctcaccgcaagctccgcctcccgggttcaccccattctcctgcctcagcctcccgagtagctgggactacaggcgcccgccaccacgcccggctaattttttttgtatttttagtagagacagggtttcaccgtgttagccacgatggtctcgatctcccgacattgtgatccgcccgcctcggcctcccacagtgctgggattacagggtgaaccaccatgcccggccctgacttttacttttactcacctctctagaaactgctgaacagaaaattgagttgcttttttaaaaagtagtttagggttatcaagattcaatttccttaggataaatatgtgttgcaattaaatggtttagaaaaccttggattaaataatatctaaaactcttatgggcaatgcctcttaatttcatagtcattattatattttaatgttaagattttcctatattttgaaaattttatcagcataggtcagatcttttttcactttataagtaattctgagtggttcgtgatccagcaatgagactaagagaataccaaggacatacacatctaaataaaattaaaggaatctagtttattacaaattcattgtgattaaactgtgtattgagtttcccaatagaaacttgacttttgtcagtaaataccgaattacttcccaaggaaaaaaaaaaaaaagtagtattagcataaaatgtttcgttggttgcttttttatgcttgtttcagtatcaagggtctactgatagctgatgagatattgggatttagtgaagggactgtgaacacccagagaagcagtactaggtcttactaatttggatagctccattgcctggcataatgttggtgcttacagccatgtctgtattgacactttaagggaaggctttaacctggattgtcagacccttatatggtggctatttgctaagattatcaaatctttcaggaggttcctcacaccaggtaaagtttgatatacatgtgcatcgttaaagagagcatgtctgcctgggagcagtggctcaggcctgtaatcccagcactttgggaggccgaggtgggtggatcacctgaggtaaggaattccagaccagcctggccaacatggcgaagacccatctctactaaaaatacacaaattaggcagacattgtggcacgcacctgcagtcccagctacttgggaggctgaggcaggagaatcgcttgaacccaggaagtggaggttgcagtgagagtgagccgagatagcgccactgcactccagcctggacgacagagcaagactctgtctcagggggggtggcggggcaggaaaagagagcatctctataaaattaatttgatttcctcagtagttcattaccctaaatagcataaaaagtgtcctggattttgtggaatcatgagctagataactttctaaagttattttatccctttaattccaagattttatgatcctaatagcttaatctcacctacagataaaaaacagagtttattcaggataaataaatagcagcctcaagggtgaaaaatgccactatcaccctcagtgaattattttaacatttttaatggtcagctaccctttctctgaaacacagaccaattttattttccctgtcagtctgctgtggagttaggagcttggtgtctgacattgaggacctctgcgtttgcattctagctctgccccgtacatgcagagtccacatgatgtcttcggtttcatgttctctgtccgaaaatagtgcattggtgtgcagtttagtttccaattaatcatccactttctcagtaaagtgttagttccagagtcaggaagatccatgtaatctgagagtgggggaagtgcaaagaatatatacatatacacgactgtatatatgcgtgtatacacaaaatactgattagtatctacattaaatatgtatatgcaaactgtgtatatattaatacaaaaacatatgtatattcatgtctgtgtgtgtgtacatgtatcacatatatatatcacatgtatatatcatatatatgtatctcagttgctctttagttccttaccacttctctaggaagtagaaaaaaaatcacttcatcataaacagtactatcatatcttaatttttttgtctcagtgtataactgtgtacttgtcttgacaatacaatttcatttatgagcatttaaaataaccctctttcaccttgcttgaaattgctttatgtatttctctgtgagcaatcttttttattctcttgaacaatagatgaaacaaaagctctgaatttctgtaaggtcataggtatggactgaacttgtgactgattgtttcataaaaccttaggtactacctcgggtgatgaaggagagatctttgctagtggctttggttataagggctaaaacgtgaatacctctttgaaactcaaagttaaaactctgtacccagatgcacagagtgaaaacgaagtgaattaaatgcatgagtgaaattctagaaaaatgtaggggagcaagagagaggggaaaattgatgtgccatattttctctccagcagataaaatctgatggtgaaatgggattgctctacacaggggtggtttacctttggggcaacgaaaaagttgcttcttggatttgctccgtggaaggacaaaagtgaggtattgcagactaaacaggagagaaggcatcagtacctggagaaagaaggatggaggcaaagttcctgaaataacaagttgaggaactaggcagatcagcatgtcttttctcccaaagatcctgcaccacactttccagcgctattacagggcttcccagtggcgtgatgatgctcacagcagagccaaagaaaatcattactttaaaatacaattatggatggtttggtatataacgacagttattatttatccaatgcataataagagaaaatacatattactttatctcatttaaccctcacaccatccttaaaagatggatgctatttttggaaacattttatggataagaaaagcgaggcttagaaagctgaagtcacttgtctgagatcatacatacaggaggcaatggagacaggagtaaggcccgggtccccatgatgagctcatttgcttttttctgctgttctgggctgagtcacaaaagaaaatttcccttatattgtagaggatgatgaggaattttggaatacatttaaatgaccaggataaaaggggctagcactgtctgctttcattttgtcgatattgtaaggtctgtttttgtctcttccctactttccaccataaaccacacacacacacacacacacacacacacacacacacacacacatgcgcacacactcctttgtgtcttatgaattttcccctccattcttctttttcatttcgtacaagcccacactcgttgctcggtatactaagtcttgggttcatgattgcacctgccttccatcacttctcattggcacccatgaacctgacatcctcacagtatcaggcgtctcactgttccgcagcaggacatgaccttttgatgctgccttcttctcaggttccctggtgtctcttctgaccttctgctcctttaacagctaataccaccttcaaggcagagctcaagtataaacagtttacattctgatgggaacattccctttcctccccaccactgcctcctcctttactccatcgcactttcttcatcctgttattatttcgcactgtgataattgaactagattcctttacttcttctaagctagaaggtggcagggagttgttttcctgttcatctgttaccagcacatgcgagatgctttatgtgctgccaatttaaaaaagcaaatgaacagcttcaaatacaggaagagtaaaaatagtctgcccagctaaagattcgctttgaaggttgttaacattgacataacataaaaggaaaaatgtatgcgttgctcaccatatttagaaatgtgaaatatgaatcgtatgttacattaaacatttattcttggtggtagcaataaaatagacacttctgattgagcaaagcatgggctgaaacctgtgcactccaccattcatctctacaactcttaacagtcgggatctgccatttccatgtctcagagaagaaaataagattgactaagaagacaattgccagaaattgcactgttacccggtagagaaagtagaatttgaccaacattcaacttgaaaccttgtgttctggctacagcgctatcccacccacatcaggtattaattgatctgtagtgtcatatcccaactgggtcacatacaaataagtagtaactaacttgtatacttcccaaattagcatctgtgtcatgcatgcaatttttgcacttccaagtttagcataaatgcactcccaaaattagcgtctatgtactgcacactttgtttttttttttttaaagccaagtagggccaggcgcagtggctcatgtctgtaatcctagaactttgggaggcagaggtgggtggatcatgaggtcaggagatcgagacaatcctggctaacatggtgaaaccctgtctactaaaaatacaataatttagccaagcatggtggtgggcgcctgtagtcccagctactcaggaggctgaggcaggagattcgtttgaacccaggaagcagaggttgcagtgagccgagatcgcaccactgcactccagcctgggtgacggagcaagacttaaaaaaacaaagtcggatgagtgtggtggttcacacctgtaatccaagcactttgtgaatccaaggtgggtggatcacaaggtcgggagttcgaaaccagcctggccaacatagtgaaaccctgtctctactaaaaacacaaaaaatcagccgggcatggtggcatgtgcctgtgatcccagctacttgggaggctgaggcagaagaattgcttgaacccgggaggcggaagttgcagtgagccgatatggtgccactgcactccagcctggtgacagagggacactgtctcaaataaataattaaataaataagcaaaagcaaagtcataggccaaattttaaagttctcttgtaaaaatctcatgtccacgcagtatttcctgagtctttgttgtttatactcatgtaggacaatatttatgactttgccttcaacttggaaatattttcttctttatagcacttgacaatcttatgttcacttttccttttgggatattatcttctgctttgcaattagctataaccttcaaagtgctgctttctcctgaaatacttggttctgatgacttcaagtacttatttactatcttaatttttttatttaaataaatttactgtttctatgattgacatttatttttggcataacgttaaaattgatgtttcctgctttcaactctgtcttatacacctgtcctgattttctatttgatgtaattttttgatgttctactgtcacgttgattttatcagatggaaagttacttttcatcgtctccagcccccagaatctgccaaacacatctgtcaatggcattattagttttcaataattcgcagttaaagtttcacacaattttgaatcttgcttccgttttctgtatgtagagttacatattcattgctttttgaatctccctccaaaatgtcttcatgaacgctattttttccattcttaacgacactatcttattgttacattaaatcactcctagatgaaaccacaccaacctggtccaacgtgagaaactcataatgggctgctcggccttcagttttttcctttccagtgaactctacacattacctaaaacactggtttcattgtattattaacaaaatcaaactatatgatgaattatttagtatgtgtgagtattaagtcatttgctaattgtttagttcacaaatacaaatgctaaatctccaacctttttaaaacaaagacctttattctatgtatgttccaaaaaattctttttcacaggagtatatagtaagcatattctgtatcaattaaactttatgaattctataattgcacacacatttctggaaaactgttgatctatttaacatctagcataatatagggcatcatgatgatgaaatgggttatacagaaaagagctagtataaaatcacattgccatcatgcaaaattgagaaagttttaaatattgaagatttccagaaacaccataactcatcaattcaggcatactggccatatttttaaaagtaacacttggtttttttctgacccgaccaagttgaagaacagtggtgagttcatcatgacagtccagtttcctaaacgctaaaagttaatttggggaggaaataaattatatataaatgtaaataatatttgttttaaccccatgcttaatattattctggtctactccaacgaggtatgtataatgctattgaaatagagcatgcgttctagacttgtttttgcagatgtatcttcactttggctcactaattgtctcactccaggattaacttcgccctggaggatcagaaaaaatagaagctagacagtcaatttctagttttcaccccatggttccatatttcttttggagttacaggaaacaggtaaaataaatgtagcagcttcctgggagtcatcttgggcattttaggtctatattttctatgtctgctggataatagaagagctgggcccaggtataacacagtgactgaaaaagggtggacttcactttttaacctgaaagcaaacttggcagtccaaatcatcctttaaccggaaacagctgtgaaagctgaatgtttttaaaagaaacctgttcaaacacataagctggtgaggaaagagtgcagatatagaatatatttagattttattagtagactgttcttatacaatatgcaggaatgcattgtgtttaagaaactgaaacagaaatggcaagaaacaggataagtaggacaaagaacaaacacaaacataagtcacattagtactgagaatagatgcgaataaccagatttcacttctataaacatgactggatttactttatcaatattagtttagctgttttacttcaggttctccttagagaaaacaacttgcaattgactacattttaaaagtttgcaaaatgataatggaaataaaagatatacgtgactaatcataacctggctatcatgtcttgaatttctcctgtgtgctagctaggccccaactcagtctttaagatgattcaatatacacaaaaactcgttcatctatacaatagtcaccaattatgagctgtgatcctggagagcaggaaggttaactgacttattcaacatcaaacagataatgagtaccgcagctaggcacactgcaagagggagaactgggatttgcatccctaccatgtaggtgacacagactattctggataggctaagtctgagcaatagcctacaggagacatatctctaccaagttggattatgtgctctcttcagcttttatgaataacacatcataattttgtgtaaaaagcgacattatgctgggcatggtggcttatgtctgtaatcctatcactttgggagggtgaggcaagcagatcacttgaggccaggagtttgagacaagcctggccaacatggtgaaaccctgtttctactaaaaataggaaaattagcgaggcacggtggcgcacacctgtaatcccagctactggggaagctgaggcagaagaatcgcttgaacctgggaggcagcggttgaagggagccgacattgtgccacctgcactccatcctgggcaacagagagagactttgtctcaaaaaaaaaaaaaaaaaaaaaggaaaagagaagaaagcaccacattatccttgagacaggatttactgcacaaactccctttaggatatcttctttccttctctctgcgttacttttctcaggtgagaaatttccactgaaaccaaccaaaggaaataattggcaacattgaccaaccaaaatggtggtgtttttctgcttggaggtgtttgcatttccttctgataacaagagttacctggctctgatgctgttcctgtctttatctgggtaaggaggaagcccaccgactataatgaaggatttatatttcagctgtttcccaacgttgccttttgaatgttatgcttaattcgctggttctgattctttgtgttatttagaatttgcctctatgtattatgcattttcaagttgcacccaatcctggtagaatgagcaaggccatagattgtagaacacaaaatggcataaaggtgacataaaggaagcgtgagcaaggaaggagctcagaaaagaaagagatccctttggactgtgctggtcagtagggccttctagaaggaagtagtgagaggcagaaacgtcagtgtattagtccattttctcactgctataccaagacttggcaatttataaacaaaagatgtttaattgactcagttccacatggctggggaggcctcaggaaacttacaatcatggcaaaaggaatagtggacacatcttacatggcagcaggtaagataaagagagtaaaaagcccaggggaaactgccattaatgaaaccaccagatctggtgagaagtccctcaatgtcatgagaacagcatgggagaaccttcccccataatccaaccacctcccaccaggtctctccctcaaaacctggggattacaattcacaaagtgatttgggtgaggacacaaagcttaaccacatcattcagtggtgagggatgagggggatttcagtagcagacggtggagggtttgcctgttgcacagagtgaagtgcattgcatgactttgtaagaatgtcttaaataaggttccccaggaaacagatgcggagatggagttgatgtgcagaaaagttattaagatatgctctgggagcaatatctgttaaagagtgagggaaatgcatttgggctgagggagaaggtgaactttgacacatttgtaaaggcctcagcctgcctgcagctataattcttgttagtgttgtcttgacttgaggccagaggctctggtctctttaacctcaccatcagtgtcgttggatgatgactgccctcaggaaggatgccaccagggaaggaagctctttcacaagccaagagggcatctggtctgaaagccccagcagccagcaatgccaataaagggcagtggacagggccagcatgcaagaggctattatccaatggcatctgagcatctctgaaaaaattttaagttcaagggtacatgtgcagaatgtgcagatttgttacacaggtaaatgtgtggcatgctggtttgctgcacctatcaacccatcacctaggtattaagcccagcatgcactaggatttttttcctaatgctctccctttccccgaaccatccccctgtcaggtccccatgtgtgttgttcccctccctacgtccatgtgttctcattgctcaactcccacttataagtgagaatatgtggtgtttggttttcggttgctgcattagcttgctgagaataatggcttccagctctatccatgttcctgaaaaagacaagatctcattcatttttatggctgcatagtattccatagtacatatgtaccagtttctttatccagtgtgtcactgatggacatttgggttgattccatgtgtttgctattgtgaatagtactgcaatgaatataggcatgcatgtgtatttataatagcatgacttatatttctttgggtatatacctaaacatggaattactaggtcaaagggtatttctggttttagaactttgaggaatcaccacagtgtcttccacaatggttgaactaatttacattccaccaacagtgtaaaagtcttcctatttctctgcaacctctccagcacctgttgtttctagactttttaataagcatcattctgactggcatgagatctaagcatcttaatggctcacacaggatgtctgcaatagtcataggctgcaacatcagtgaaccacaaagtgcattctaataaatctatgtaattatctattgttatatgcactatttttagagtactatttgcttaaaaaggaatgcaaatataccagcctttggcatgtgaagataattcttctaatccttataaacttctgtgctggtttcctagtgaaatcaacatgaaggtgaatcgaggacatgtctgctgcacaaatgagattaaaattctcagctgactttatgatacctttgtggctagaagagtccatggcatttcctaaatgcctaatatgctactgactaatcctgtgagaattaaaacccattaatttcccaatcaatagaaagcttttaaatttgaatattctttagacatatattattggcaagcaggaatatttttatttctagaataattatacctatgaaaaaatagaaaaatataaaatacagcacaatattgttgtataagtatgctggtatcatgagtaacattttgtctatttcctttgttcatattcttcaaatttactctaataaaaggtgtattttgtaataatgattaagtttggggaaagtattttatcagctaagttttagaactaaatttagatctgtcaaaaacaaaaacacgcaaaaagatctgctgcattaggaaggaattcccatagaataatcataatgcctgtaatatacaactcatgtcatgaccttttagaaagtgtgcagcagaagttatggtagcatatctttctcaagcttatttataatttattgacttatttcagaccaaagttgcattattagcttccacactcacctccctttatcattgtgagtagcagtttggtgtcagaatacacagtatgttgtatctcggagcccagagtgattattagcagaagtatgtgtttgttaatcagactgcaggtaaatgtattcagtgaatatgcaaaagagtcttctacacgtaaaggaaatgaaaaaagtcactatgaaagcgaaatctaagggactagctgaaggttggtgtctaccagagtagccaggaggtcacaggagactatggaacattcaaagtgggctcttcagaacaggaaagcatggtcagtgtaaaatgcacaagggattttgaacaactaatggaaacaaaatgtaaaagtcaatttttacattaattacatcttgaaatcgtgttacttggtgtgtgtgtgtgtatatatatatatacacacatatatatacacacaattacataaaatatgttgctgaaataaattttacctgtttcctttataatttctagtgtgaatactaaacatttaatattgcatatgtagtttcatcataaattgtatatgtacttgggcagctctgacttagagtttgaaattccttatgttaacatagctgcgatggttacctcttattataaaccatttatctttaacactcccaaatgaaatcattataattcagaagcatatagactacctttattaaaataattaggtgtttttgctcaattaaatgatgcactgtttattctgaagtaatgaattagggcagaattatatttaactactgagcatgtaacttgttttatctttttgtcttaatattgtgaataaacctggtagtaaataaaatagcaaaatagtaccatgcatctatctatctatctatctatctatctatctatctatctatctatctatctacctacctatctatctatctatcaatctatctatctatctatctatctatctatctatctatctatctatctatctagattcccagtggaaaagcaaccaaaattaacatggaaaactcaattacaacttttaatatattaagactcaggatactgattaagaccaaataagtctcaaatgatgtaagtatagtagctggtgttttaaactcaatttcccctataaaataatggaactgaaataaatgtaaaaggtaagatgtcaccacctagcaaaagagaaccaaaatatctcgtatatttataattgttgtgctaaaatcatatctgcatggtacctgcttgcgctattttaaaatctaaactaatgggataattgtgtggtttacgggtaattggggagagagaaagaatagctgtttactggtataacatttaataagtttatatttataccagtaaactttgtttactgctatacatttaataaaatccattttatcggtattctgagctattacatatattttcatgctatatcaaacgtgtattttctcaagcatctcagttatttaacatgctgtgatttaaattacagatatcaaatttacataggtaagcatatatgtctcctaaaaaacatcaaaaaagtaacctacatttcaaaaattcatagtcccatcaacacaggaagaaccagtgcatccctctgagcctgagtgatgggccccgcatttgcataggacgcagcgtctccacctctgctgtagctgtgtggttctctatcaataaggtcattattcaggcccagatgcatcaccagagcgagctattgtgcttcctccatctcaattcagtgctcctgcagcctgaatctcctctgagctctttgaaatgaggccaaaaaaatgtatctaaattacaccatttactaacgcgaagaaaagatctttctttggtatgtattggagttaataatatttattaggcatctcatttatacaccctgccatagcagcattgtaggtagggttataattttaaaagtctagactggcttatatttctcaatatctggtggcgtgtgggaggagacagataaggaagccctctgcaaagacagactgtgagtttaccctgcacccctagcaagacttccagggtacagctgtaacatccagtgtcaaaaattgttgaatggacagaaaagataccaaactcagcatgaagttacaaagacgaagaggttaatacaggaaataaaaactgtcaacgatcaatttaacagcttaaagatctgggggtagaattgacttcaaaactgttattccgtgttttctttctgaaaactcttttggacaaaggaagaacagtccttcgtgaatttcatgtgctttgtagatataaagtaactctttccctcctgaatgatctcatccccaattatcacagcaagatttcctattgcattcacagtccttcctgttctaggtttttaggcagttaattcagtctgtgctgagagtaaaatataggtcacttacaaagaagggtgcattatttataatagtgacatgatgagagctccataatcattcaataatttattgatgacttcttataatgtatcaaccatttttctatggttggggcaccatagaaagagcagatctattgtcttacttgctgcgtattttctgaatgacttatgcctccactctttgacctcattttaccaattatacttaatggattaaatggtcactgagatataaataaagattgagtttcaagcaagttttgattgaagtatattattaagcagaaaatatgcaatgtactggttctggaataccatttcaagaggcagggcagtcgtttctaactatatgttaacttatctaaaagactgcaattaaaattattaaaggatcatggtttaatttccatttgaaatattttcctgaacggaaagaaaactaaaatacatgattaagccacgactacataaccctgagcacttcaaaatattgagtctgaacaaattatattccttatgccacttatgacatgtcaaaatatcagaccctgatagaaaaccaacgtctagtttttcatttagatcttacaagaagcagctgctagatgcccatgaattacgctggcaacagacagcactctgtctgcatcatctatgcaatctccacctccagagaggtaatctactttatatgagatttcgcattattcttgtttttcttgctttctctaaggagcacccactgctgaaatcatgagagtgaccatgtgtttttcagaggtagataataaaagttagacagtcgtattgtacagagattagggaaatatattctctataatattgggggtagaggtgagactatctttttgaaaacatatagtagagcaaaatgtataaatttagaacctagaaattagtatcaattcacaaaggagcaatcatgagattaataattttctggcatattacttttttacaattttatcaagtttggattcaaacaaattgaagataattttacgttatcgtctgtattcttaaaagtattaagtcgagaagacaattagtattccaaggaatggaattcttcaaattaagtgttctgcccaaattggaaaccagccaagctgctctctaaaaatatcaatttaaactactgttttctaaaaaagagtggaaagatttttgtctactggatttagataattctctttggtgttcttaacccacttttcaaaacataaaaatttgttaaaaaaaaaaaaacccatctctactaaaaatacgaaaaattagccgggtgttgtggcggctgcctgtagtcccagctactctggaggctgcggcaggagaatggtgtgaacccaggaggcagagcttgcggtgagcagagatcgcgccactgcactccagcctgggcgacagagcgagactccatctcaaaaaaaaaaaaaaaaaaaaaacaacaacaacaaaaaaaaacctttgctgaggatggttatttgaaggtaatttccatgttgcacactctttatttaaaattctagagctgtttattgaataccctggaatggctatttcttgtttaattaagcaactgcatgttttcgcacctatgtagagagctatcacacagcatgaggaacaggtatgcaacgcatgggctcattcactgggttcaaatcttgggtctccctctgatgttcacacagttaatatagctcgtgactttttttctttattttttagaaactgtgttcttccgtctcataaaaaaaatggcatagctcttacctaggctgaatcttacaataatgactttccatatgtgccacacaaagagtttagctattaaacagctctaactcaggggtagcaatcccttctgtgactgggatcattttcacttcattgttctccacaaaactgaagaagcacatcatcggattgtcagataatacattgaggattatagtctttcaagataattcactgtatactgtttcaaagcgtaattcaattaaatgcagttcagttcaaaaagtgtttgcagatgcctatttagtttaaaattatactgctgggaaggaaatggaaggcaaagaaagaaatggaaataactcactaattgatcaactgagatatggacaatgctatcaacctcctgagcagctgagaaaaaattggatgcaaggcagaaaactgctcactaaagatatatccaagcaaacttgctgtgctggagcaaacgaaggagtggctaattcagattgtgcccaattgggcaggcatcaagaggaggaattttagttggggtttaaattattgggataatttccataatagagagagcctgggggttgatgaaaggtagctggatgtggagttaacaatagttagagagagcttagtaactgggctgatttctcttggcccagaagctaatctgttgatttacaaacatttatatcattaaatgccaaaagggtttgaagaatcgagcttagctaattccacatagtttccaaacatttatgtaaagattaaaaaatgtattacatagtttggcattcattcaaatatatattttttaatctttacataaatgtttggaaactatgtggaaatctagctagaagaaagacattttttcaaaggttattacattaataatattttacagccaaataaacttttgataaaatgtacaatgctttgtgtactagtcctgtagacctgatgcattttccatgaacatatgttgcctactaacagagcatgtgctggtgcgttggcaacaagtggaatgaggtatggagtagcagaatatcctgtcgtgactatcttacctgctagttacctttttcattcggtgagccaactatgtatgcatgatgtgggggcctggtgtaaggttgttaggacacaagaagaaattaggtttgtggattgaacgagaacatcgtccaaagccgtgagacagagttctccttcgatcacgaatatatacagaaggctaacgtgctttacaaagaaaagaagagagctgcaaccagaaagtcaggcaactatgcaacgacctaaaattcactgcattgcattgtcaggataattgagaaatatgctttctgcccaaatcttgcccaacatgcagcagggcatttattgcgtgtttactgaatgaaaaagcaacaaaatcaattaataataaataactcaggcactcccatggagcccatggtggctcctgagggaatgaactccgaactcaggcttccaagtaaacagaacctccactaatcctacggtgtttcttcacgcctgatttatgaaggtttgtacgcacaatgagagttggattctacatatgttacatcaatggacattatgttaaccatgatttcttatgatttctcatatgtataaatatataaatatacattaaatcttatgttgatattttccgcagggcttgaagattaggccctattaaaaatatgtacagagacactttgactgagttaagataagaagatagtctaaaaaagaaaatatttcttagctcttgtcttcttggaaaaatgtactatggatacaactaaataatacctttcaggaaatactgctttataatgttatctaaagtacaaatcctcccaactttttatatctaaaaatgatttggatttcgacaaagcgatgcagtgggttaataacagtttggacataccatgttaatgaacactgaaaagcccttagcttattgaaggccataatttgcagatgtacactgtcgagtcccaaatggatgcaaggtgaaaagaaacaaaacttttaaatgccaattaaaacaagtagagttgactatcatggtgatagaaaatagacatttattttcaaatgtagagacttgtgaagaaaatcacatttgcctttacgaaacataatccctttctttttattctggtacctgtgcactatcattctcattaaaacatcatcctgaccaatcccgcacatagctcactggggctctgcctccctcaccgctggctgctggtctacctgcctgagaccaacttacccccacatggattagtatctcaccatcctgtcctgtgtgttctggggcctctcctccctttccgcattcatcaacacagtcctccctaggacctgcgacctgctattactttaagcttcttcgtctttcgttattctacatttagctacccacagtcacctttttatgaaagcattcacaggtacccaggctggatgaaacaccacttctgtgctcaggcttgattttgcatttatttatcctttgtgcaattatttgcttacttaaggggttggtgttcccaaacacttatttacccgaggcactggagcacccaactgcccaggagtgtccctctcctgagtgatgctactagctagtttacagtgtaggcacatcttattgtaaaagatgaattaataaaacaaatggaaagtaaattttgcatccttcgtactcgagggcgtgggtcaatctagcacagagtgtggagcatggtgggcattcaattcacatttacgttcaacagacacatgcgttgagttagtcttctttttaatgtcttcagccccttgcataggaccttccacccagcagttatgtgttctctcataactgtaaaagaaaattataaacagatgttttggaaaacaaaactagtggtgaaaattagcaggacattgatggatgactttgggaagatgccttttatgttggaatgagcttcccatgagtgctgctctgtgggctcctccttcatgtcagcccctaacctccgagagagcacaggtaagaacccaccacactcattcgtatactcgcctatgatcgtaacatgagccggtacacagaggaagacaagtccatcaaagcttcctgttctttccattcagaaaatccttccatacagtctgccgggtgtcagcgactgtgttaaacgtcagggaaacaaaaatgcattatttgcagttgattctcttaaaggccttggtgcttagctccttagctgagttatttgggatgaaactctgtggtaatcatttgtttgagcctcttctgtagaaaatgctttggattgcacgagctcagagctgtttctgatttgttctgtttacctggtcttctctgcgtggaaggggtgatacccgcaaagtacagtcaatcacagatgggagggaaaggtgttggcgttcccaaacacttacccgaggcactggagcaccaaactccccaggagtgtccctctccttagtgatgctactggcttgtttacagtataggcacatcttatgggaagagaggaattaataaaacaaatggaaatagaagcagttattattcatatgggaaggggaggtggctgagacatgacttccacttctcccctttttcctagccgagtcttccagcaatcttgatagacgttattgattcctcaccatttacctaaaagtcaggtaaataaattaacttgtgactaaactgttatttcatgtgaagaagagaccaatatacctgactgtaaggtactacaaagccatctcggggaatatcatttagaatgtgtgaggcaaacagttaacagcttggggcttgcagatggacagatctggttcaaaatctacttgctctatgaccttgaccatttatttcacctttcttgattttagctttgtaagatgtggctaataacaccacatacctcatggctttatagataagatgaaatgaagagatgcatataaaacactggaaaaggcagccagaacaaattgagtgcctgaaagtacacctgaaggaatctttctcagtgtgattaataagctactacaattaccgtttaagtaagtatactatgggttttattcaatgagggaattatgcatgaggagcaaacaagtgcaattttactattcttggcattttgggaaaactttagaataaggtattatctgaagatcacttatgaagataaatacctatgtattaatataacatttgaaaaaaattatgaaatacttagaatattttcttttgaagtaaaaatacctatgtcaccaaacagcaattttgccaatgttgcaaaataagcattgtaaattaatgaatattctaagataatttctgatctaaatttcatctgttgaaaaagaaacgggaggcttggaaaggctgacggatttgtggagctgcacgtcagttgcataggaggtgggaaacgaagtgaagtccaaaccaggtaagtcaaggcacagcctgctgcccctcccttgccttttacaatgtgaattgccacgtttagcattttctacttggcattttaaaaagcttatgttgttgttattatgttctcttaaagaatatatgcatcccaccactaacatcattttttcctttaataaaaatcatgaatcctcatgattaattgggattaaaaataagaacaataacaagttatttactctcaaaagcaaaagctggacagaaactctctctccctccctttttgcagaaagacattattctgttactccggttcctttctcccattcaggaaataaatcacagaggacacaaatgcatgaaaagatacttcatgctcatagatcaaaatacttaacgttgttacaatacccatagtaccagaagcaacatacagattcaatacatattcctatatataaatttttatattcctatatacttataaattactgtatatatatattcctatatacatattcatatatgtattcctaattacatataaaatttgtaaatatatatgtgtatgggaatatatattatatataattagcaactatatatgtacatagaaatatatatataatatgtaattaagctattatatatatatgtagtacgtaattaagcttttatatattatatatatttcctaattcttatcaaaatcccaatagcattcttcacagaattttttttttaatttctaaaatgtgtgtggaaccctaaaagacctcaaatagccaaagcaattctgagaaaaaaatcaaaagttgaaggcattacacttcctgatttaaaattatagtacaaagttatagtaatcaaaacctatggcattggcataagaaaaggcacatggaccagcggaagagaatagagagctgaaataaatccaagcatatatggtcagctaattttcaacaagagtacaaaaaggatacaatggggaaagaataatcttgtcaaaaaatggtgttaggaaaacaagattttctcatgcaaaagaatgaaattggaccctttataccatacataaaaatcaactcaaaatgaataaaaatcctaaacataagacctgaaaccatgaaaatcccagaatacacaggggaaatgctcgttaacattggccttgacgatgatttcccatatatcacaccaaaaattcaggctacagaacaaacaataaataaatgagactacatcacactaaaaagcttctgcacagcaaaggaaataatcaacaaaatgaaaaggcaacttacagattcagaaagcaatatttccaaaccatatatcagataaggagttaatattcaagatttgtaaataactcatagcactcaacatataacctcatgttaaaattggtgaagatatgattcagtttaaacacacattacacagagaagactgaggcccagaaatggaggccgctttgcctaaaattagcaattttcaagaggcagagctggatgaggaagtcagtctacattctgtaattccaagtttctaataccaatgttctctaccatatctaattgtattaaagtttctcccagctgacaataaataagtcgattaaaaagaacaccaggctttgggccctcttcagggaaattgcattgctactgcagagaagcttgcattccattttaaaatatcaaatccaaatcaaaacattactttaaatacacatcctccgtgcgaagctcagtcgtgagaatgcgcagttatgctgcattactgattcatttagaagttattagtttgctgctaggcattttccactctaaggaacgaaatcctgaaaagaaatgggatgttgaaatattgagtaattaaatgttgaaacgtccgtgaattcctgattaacaccatgatttctacgcagtcaaattaaaacatacgcaaagtaaaaacttcacccgtgtcccctgtgtccagcatgtcaggctagcggagggagaagtctatatgagagatgatggctgtcatttcacagcgcaagttgttgactttccacatccctgatgttcccaaagtttgtttttatttccatcaacgataccttttctgttgtggttttaatccacgagggagtctgtgctcaaagcggtgggcatgaagggagcctccagaatctgcccctcggctgctactctagcccatcccggggatctcgtgataattcctgcaacaatgatcacaaacattctggcttcaaacaagacccatgtctcgtttcactgctctgcaggttaaaagtcccacgtcggtctcactgggctaaaaccaggtatcggcaggctgtatttcttcctgcaggcttgacggggaataggcttccagggtcatttgggtccaccgagagcagaagtcagttccttgtggtggtagggatgaagtcctgttttcttgctggctgatgtccacgcatcattctctgcttccagcagcagcctgggctcctcaaatcctcacactcctctatcctaaaagtcagcaacagtgaaccagtcctttacacgtcaaatctctccttcacgtcatctttacgcatcttctatccttgctttttttctgactccattcaaagaaagttctcggcctttgaggacttgagtggttaggttgggtccaccctgataatccagaatgatctccctattttaaggcctatagctttaattatatcatgagcgtcatccggtcatggagcaaaacataatataacattcacaggatctggtattacagcatggatattttgagaaaagtttttagcagtcacatatgtcttaaagtgtattgaaaaatatcaaagtgttttgaattaaaattttttcttagtatttttatcataaagaaaaatgtaaagatgtggaatctgaaggtacagaaaagaagccataaaaatgtatctgtgaaaggatgtgcattgagttaagtttgaggcttgaattcagatgaagtggattcagatcccggaagaacctcttggctaacagatcagtcttccagggcttaaggtactcatctaatttcggatactaacatttcctaagtttgatatgtatgtctgcttctgaatcattccatgaaatgtggatttaatcctgttattaatgatgaataacgtaagaaattgggtttcttacaatacttcatccctgcaacattgctggaatataacacatgggacatttaaagatacatggatgagtatgacttctagcactgaccaattaacaagaaatgctcatacaggttgaatatctcttatctgaaatgtttgccaccagaagtatttcagatttcagatttttttcagatttgggaatatttgcatatatattaccagttgagtgtccctaattaaaaataaagtatcagaaatctgaaatgttcctgtgagcatttccttctggcctttcctttgaatgacatgtcacagctcaaaaagtttcagactttggggtatttcagattttggaattatagattagggatactcaatctacaccaagctagcagtttggtgtttataaacttgcagttctgccttctaagctcactgactggtggctttttgtttcaggaaagcagaaactgaccagaaaatcccaatagctccttgtttctgcagcagttgctttactaacgtatcgctgtttgggggaggcctgtgcaccccagagcagcacagagattctttgtgttcatggataaagaatactctcagattgcttcctcaaccagtttttatgattcagttgaaagaaagttacttttactttcacactgaatcctcctttctcgtctatatcaggataccaaggattcctcaggagtgtttgtcatctccttttgggttattgaacgagcactgcaatgtgtttgtgcagcctttatcgtcaggctttgcacgccacgctagtgtataagcaccactcttatgatgaacattacccatttcccttaaatactgatataatcatattaaggaagcaattaatattatcaatctacatgccatgtcataaattcccaataaagttaaaaaaataaaaatttaattgtgtgaattacttttgaaactcaccagtgcccaaactattaaatacgctttctaacacaaaaatcctactcttggctgggtgcagtggctcacgcctgaaatctcagcactttttgaggcagaggtgggtggatcgcctcaggtcaggagttcaagaccagcctggccaacatggtgaaaccccaactctactaaaaatacaaaatattagctgggcatggcgatagatgcctgtaatcccagctactcaggaggctgaggcaggagagggttcacttgaacccaggaggtggaggtggcagtgagccaatatcgtgccactgcctaccagcctgggtgacagagcgaggctgtctcaaaaaataaaaataaaataatcatcttttctttccttttaaatagacagcatttgcgaatggggcaatgttaaattaacagtgcagtttgaatcttactttcctgagcaagttatagtaattgagggcaggtctctcaaaactgaaggaaatccatgagtaagatcagagaaccaaagcattcttgaatcccacctccagttggaaacatccgcatgtaaatgtaaattaattatggtagtaagtatactcctctaacaatgccatttagagtaatatgcttgatatttttttacatataggaaataaagtactttataaaaaagaatatcatcatgtccaggcagacatatagacattctgataatacagaattaataccaaaagtaagtttgggagttaatcaactgatgtggtttggatccatttccccaccctaacttcatgttcaattgtaacctctaatgttggagatggcagaagtattggctcatgggggtggatccttcatgaatggtttggtgccatgcctttgttgctattctcataacagacttcccaggagaccttgttgtttaaaagcctgtagcacctccccgccaacccccactcgctctttctctcttcctcctactggaggcatgtgaagtgttgattccttgtttaccttccgccatgactgaaagttacctgaggcctccgcagaagccaggcagcttccagcatgatgttctctgtacagcctgcaaaaccttgagcaaattaaaccccttttgtttacaaattacccagcctcaggtatttctttaaagcagtgtgagaatggactaatatatgaacaataggaaatcaagatatacaagagcaacagaaggaaaaatttaaaaggtactaaagagcaacagaaggaaatatttaaaataatatgtgtaaacagaattttccccaggaaaccatgcagtaattctaatattctcaacatcaactagaatttgattatttttttctgattgtaggacatatcactaaaataggaaaaatagagcttgaggatgaatcatagaaaaactgcaatgattacatcaggtccagcataaagtctccagaggaatcaaggtgatatgtagcagtgaatagatggaaggaacactacgaatttttatagaaaagtgttattcaaagatagtgtttagagtttataaacttccatgaagtatacaataaaacagaatctaaataaagtctgtgcttattgacttcaattagaaattaagatattggaagggtataaaataagcaatcattttccttgtaagaattcaggggttcctatcagaaggaccaagggtaacaaatatgatttatttatgaaagacagaataaaaaagatattttaagcaactaatcaatgttaattacaagcaaactttagacaacacttttattttcaaaaacatcatcttatgctgtttaagaggaaagactgctggaccaaggcagcgtctgtcatggcccacgtggggatgggatatctccagaatgtgtcctgccatccaagagtctgctcactcgtgtggatgtggatgcactggggatgggtcctcttaggcattaaaaccaatcagaaagttccccttaatattgttaagaaatatttcttcaatgtaatgtaccataggacagaaaaggcagagagaggacaagttagggagtggcacgccgcagccatcctgaattagtcaaggcagttggagtccatgaccaacattaaatgagacggagggaacagcaacctcagaaatgccagcacaaaaatccaggacttgagggcagtttgacaaattacagatgtgatgattctaggaaatgagtgtttggatctcagatttgaagaagcaggcaccggcccagattgccaggacaatcacagatgatccagaacaccaaggtgaagaagagatgaggcgacccacattagtttagaagagagcctgttcccatggtcactctaggaagtattttcacaaaggcctaaatatagagaaacatggagttcatttcaagaccctcctgaaaatttaaactagcagcatgtatataatattacttgttgctagttttaatattaatatgaaaatattgctactaagttttgaacaactgcacagtgctactactatatctactatacgttaactcaggttattcttatggtgcctctagagaattcttcggatcctcatgttatattaggcagcactcgggctcagagaacaagaagcagagttgtggttaggaaccaacagcgtctcagggccccataggaatggtggcaccatatttctgtgaaattccactacgggctgcattgttctccacttctgcataaacgttcgcgttcaatgatacctccaggtactatcacatagaaaatatttaaataggggggttgtgaactgacataagtcaggattctttaccacagggagacaaccagaacactggcttgattccaattttaattttgtagcaaagtgccacatactacactcagttatattttagaaaaagttgtgaaaatacaaggaatattatattagagccagacgatttaaattttaattctcttactgatttctgattctggagcttccataaattattttactgttttctgcttatcttcatctttaaaaggagatcataacacttccacaacgttactaagattaaaggcactggtgtttgtaaaattacgagctaacaattatttgtcaatatcaatttagcgtattcttgtaaaacaggtgactgatttctatctagtaaagttcggtgtgttgcatggtgaactccagcctgtatcctactgaaaacattttatttagatcagtccttggtaataatgctgccagacaatagattcacagtgagctccacattgagacggataattaaacacagtccatttcaacttcctgttttaccttgtggttgttattttaccaaagacagctaaaccatgctgagaagcagagcatcctctctgaagcaggaggcaaggcagtgcgagaaacaattaagtctaattgactcagtaggtggacgaaaccagaaaactgggactagtaaatgagagagtgcctttggtagatgagatgtctggttttgagcttggggatgatgaagagagagagatgtctcagggggacatctcaaaagaacattctcccttaggtcacaattgttagggacagatgtgtgcctagactcctataataagatcagatttaagaataaaacaatcatcccagtgtatacctgaaacataacacattttttaaaagcagtacacagagctgttgttccttatcagctaatcctacatgtgcagtaagaatgtacataccctttgattgtttttagagaatttgcttttaaaatactgtattagcttggtacagaagtgattgcagttttgccgttaaaaacaatggtgaaactgcaattacttctgcaccaacctaatgcatgtgtgtttcaaaatgtaatacatgcacatgtatctacacaaaaagaagtcaaagagtaaacatgaccagggaagcatgtggtgtttcagacttcacatctacaaatctcaactaacggcaactatgcacttgacttctgacacactgaaataaatcctcaaataaactacctatcccacatcaaagggctactccctataatacggttgtagtagggatgtgtgacaaatacgttttacatagggttaagcttttggtttcatgatggcaaattcttaaatatattcccgttctagatggtagtggagagttaaaattcagacacataaacacacacaggcatactggtgcaatattttaaaattaggatcagtataaacatataaaatacagtttatgtataaattaatataaatatacattacatataaaacaaatatgtcataaaattttccattcattaaaattacttatgaaaatattcagatttgcaattattaatgaataatctatatcagacatcagcaaactgtggcacatgggctggtcatctaattttgcaaataaaaaggtcagagctatttgatgataccatatgtggcctatgatatccccattgttttgatgatttttccacaaaacttgattttcttctcattcctttcaatttattgattctagagctccggtggtaatttgaagtacctggactttttccaggaattgtaatgtattttctgcatgagataatgcacaaaaagcactttgcactgtaagtggcacggtataagcatacagcaaatcataactttatagatcaatacttcccgctaggaagatcaacctggaaattccgtgagagggaggtcatgtgcaggtcctacttctaccactattgaccctctgaccttcatgggagtggtctagatctgagtcaaatacacctgagtagcactgtccaatcagaaatactttccatgggactatgcccattttatagtgttaatctttaggattaaaagctctcatagtggtttgtttaggagaacataacatacacttcattagggctgcttagaatagcagatgagatgcaatgatcaaaagtcagatagtatttactttcaagaactgctatacaatgtagttaggacaaaagaataaatgattaacatttacaatatatggaagcaacctgcttatcctgtgggttttaaatagccataatgttaagaatgtttagaaagaattgataggtgggtgtttaacagtataggtatgcaatgaccagattgatatatcttaatcaacatttcaggaattgacagctgtacatacagaatccttacgagaggccgtatcctcattttaaaactgcttttattgtttaaaattttagaactcctccttgggaattaactgaagtcttcggtttaaaatattttccagtggtggcaaacatatgctaactggtctgattaatattgttatgttaacgtctcccagcctcctgtagaaattgacattacttctgaatcccttccatgtataggggttttaccaaaattttcacaatatatttatttttaaaaaatcaagggaaactaactcgaactggctcaaaggataattttttacagaagagttcataatccctttaaaacttttattactaccagcaacattacccctgtgaaagagaaaactcaccacaatgtatatttaatgaagctcattaatttatttttttcttatttccctatgcagagtcctaaacccaatgcagttagagaaaaggaacattaaccaagggttataaatgtcaagaacaaaacggatatcatgtttagctcaaaggaacacaggaagcattagctgtacgcctccagcacttctcaagcttctctggcaagctggctttagcatttttataaatagtctccattgcaacatttcatcactgaaaaatccagacacgaatgtataaaaccaaaggaaagtgtaaataagaaataaatcctgctaattgcggtttgctgatgccagagcccttttggcaatgacgacccaggggattcctgggcctggaagcctgctaagcagcatcttccacttccaaacagcagcagcaactgctccccaggcttgctgcttcggggccttgctttttcttttttctttttttttttctccaataagaaaataaatacaccttactttggccaaatgattgttaaataaattcttggcttttcagcaaacattcttttctcttctctttcacaaacaatggaagcaacaagccattcaattctgagaccctcatggggcacgtacttcaggatgtctgttgaatatgatacacccgcgttttgtattttagcaacatttactacagtcacagacttgtgccataattggccagaccttcagcatctttgacaacctagtgcgcctatgataggggattatgtgtaaaaatgcaaacaaacaaaacctttatttatgactgccctgaaggtgtgcagattggcatgctttctgagcccaggctttgtctctgtatactgcgctatataatggggctttggctctactgcataatctagaactaattaggacattaagcaggtgtgatttaaaaatcagtggaactcaaggcagttcattctgattgatcagtcgatctgtctgtctgtctgtctgtctacctacctacctacctatcatctctctctggctcctttatatagcccttttaaccttttatctgaagaaaagagaaacgaacctgccttgatgttttgtgcccaaggtcctattgtaattattattatttatatttatttttttccataagttattggggtacaggtggtatttggttacatgaacaagttatttagtagtgatttgtgagatcctggtgcacccatcacccgagtggtatacactgcaccatgtatgttgtcttttatttctgacccccttcccactcttctctaccaagtccccaaaatccattgtatcatttttatgcctttgtgtcctcatagcttagctcccccgtctcagtgagaacatacaatgtttggttttccgttcctcagttactccacttaaaacaataatctccaatctcatccagttcactgaaaacgctgttcattcattccttattgtaattattttttaaaagcataagtctttataaggctcaagcaatgacctgtttttgtcactatctctcaatcaaaggtcagtgtcttaccttaaatagggtaattaccacctgcaaatagcttttcctgcttctgaacctcattttcctttctgtgtcccgccgtcttgttaagatacactctcatcttctggtggtgtcttttctttcgagtgcaggtgtcacctgcaatcccacatagtggctgtgctttgtgcccaacctagcaaatacatctccgcaagaaaggaaagaagcctgaagggcattatgtggtgaggcacaatggctaagcatgatgagggaatgccctcctgcagtggatcagcatcatgaaaacaaaaactctcccacacaaaacacacggggtcacacttggtttacaaccacgcatgaaacaagagatccctttctagatcactctcttctctatagtcatttatcttacccccatccaagaatgcttactgtcagatttataaataactgaccgtcatcttatctgatgtttagcatggaggcaacataatctcagacaccagccttttagaaagagatcacatacaagagataattaaaaatcataaggccaataggataataaaagtttcacttttgtgggtcaattagatcttatttcaaatctagtcttttgtctattgttgtactttctgatcctgtacttaatcaaatgtcctcaatgtattcaactgtaaaatggtatcggtcatgaagaagtcaggtgatggagtatatatgcacatttctgggaacactagaaatgcttactatatggtaaccattcttaatcacagcaattaatatgtgaggaataatgatcatgcagcttctcacctaggccagtaaaacatcattcacgatgacggttccatattttagtttacatatcgagagggtcaggaacatggagtgacttataccacatacccagctagtaaataaaaatcaagacttacaaaaagctctttgtaaaaaatatacaaatgacaataaaataaactctgacttcatttctccagagtttccactcttgcctctatttatgcacctttctcagtccaaaattatagcccactaaacaccaattatttcaaattacagtagcacaagcagctaggctatgccttttaaaaagacattacagtagggaggaggaaggggagagaggttgctcaatgggtacaaagttacagttaggaagaaagagttctgctgttctattgcacagtagagtgactctgcttaataatgtatatctcaaaatagctagaaaagagggttttcaatatccttaccaaaagtaaaagataaacctttgagatgatgaatatgctagttaccttgatttgatcataacacaatgtatctaagcattaaaactactgattataccccataaatatgtacaattattatgtaggtcaattaaaaaataaaactttataaaagacaccacagttttattttcattacatatagaatttgaacactttagatttaaagaaatcttatttaaggaccagaattgtagattttggtctatccatagcaaaaccataaatatgctctaagacattttagttttgtgccactgagcttagaaacacctacatttcacattctttgtaggtactgaaaataaactctgcatgtacagctattttttactgtatatttttgtacaatatagctctactgtgactcatacttctgcagatgagtattttatctttgtcgctttaatttgaatccaaaaaaatgaaaatacatgaattttggctatattattttctagttagtaatagtttccaagattcctgattatatctattttcacatggtccaccaatttaaatttagaaagcacaactcaagctatttttttcaataaatgctaaaagctttatgatgtacatgttttttggaggcagaaaagtgccatatttggattcttataaaacaatgtttttaaagacactcaaaaaaaaaaaaagacgacttcagattagaaagaattgggtcaaatgtgagatccagatggtcatgtctggaaatggtagcattaactctataaacactgacctctttcataaacttcaataaatgattgtaaaatcaattcagtccacagatattcaatcacagagttaacatgtcatatgtaatcagcaaattcatctctccaacccacctgaaattttgtagatagttgaaatacacttaacattaggcattaaataagaattgtatttcgtgaaacatatcatgatgtccactgtcagaacaggaaatcaagatggtgaataatacactcaaaaccacacaaggtaaaactgtcctccagccagagtgccccaagacccgcagcgccacagcctcctaatcagaggctgggagagagctgtacagtggctgttccagctgaaactacattctgactcctcactctcaattcagtgctttggctttggtaatctgctgccctggtcagaacaatgtatccaagattaaaccggaagtattgtcattaaataaagaaaaacattaaaacgtttatgcaaattacatggctttccctggttctaaggaaaacctagctgtgagttgttcaaatgtgtgggttagcagtttctcattgcagtgcctcttttcacttggcctcctgctccagggagctcttgtcatgaacaggctgaagccagcccgaagcctgtactcagaagggtgtcaattattcatcctccaaacttgagtggaaactgcaagcatatcctctttctagtaggtcatccagctggtgatgcctcatttgtaactgtggaggctttgacacaaggcatcaaccagcctaaggaaaacattcttatattggtgatatcactcctctaaagcaaatactttatgtcggcttttgtgacatatttccacacactgaatttgaccgtgaataaaagttggctcaatatagagttaaaagagcttaaaagttcccacagattggatgaggtgcatggctacaattaatcagtacgattagtgaaaattatggataaaaaaagtgtatttgataatttgtaaactttaacatatttttgagggattgtcataggatttggttctctatgtcttgacatttattagaagatagccaagggtacacagaataagtcagttgcctgattcatatttatgtactcaagtaaaagtttgttcttacaaaatgaatattttatttgacttgtttgaacattgcggcctattgtaattggaaaagtcaagcccaagtaaacaggctttaccttcctctagttctataactaaagatttggctcccaactcaaatagaaaagcgtgtagcattctgtctaggaaaattccccctgcagggtcatttaatgaactgtgctaccttgtaacacaagcaattacaaagggaagaacaaactcatatggattttttaaaattttgaacccgtgattaaaataacacttgcattgaaattttaactgctgttttacatagaccaaatatcttcactggatgagaggagacagaccctttagtgttttaagatttagttttttctacctgacacaatttgtttcctttataattatttcacttactgttaaatttcttttttcaccgatggttttaaatatccattatgcctccattaaaagaagggcaaatatttttgaaaattcagaaggacctagtggaagagaatgtagataatgtattggaatgttaataagagatttaaatgaagtcatatctgcaaagatcttaaacacaattctctcttcatataacatgaaaagaagaatctcagcaaagcattgtgggttggcaggaagactagaaggatatgattccattaaaactaaatttgctgaggtctattccagcccttgagcgaatctcatactgacagcattgaaagtttatgtttgtaaagatgactaaattaggctcataagtggtaaaaaaatgcaatactaaaatggaagtcctcaagttttaactgatatcagaaattctgaaatcagttctgggcactgaattattagaagtggatatttatataactatcaggcaagaaggaatctctctgggtcatgagtgccttctttcttctttcaggagaatttttaaaccatgtggaaaagatagcatgtttccatagctttgctgaatatgactcctagcctgatctattctgctgctcctagaagattgtaccagctcatgcctgttagtctagagcagtcatgaggaggtgaacattggcaaaggtgattttcataatggggcacattgggcaagttactggggtgcaaagcattggtggaagactttgctcttaggctgatggtgtggaggtggtctcagagctggtatggaagaggtacctcagttcagaatctcttaggtaccaaaatgcccccacagtgggttagatcaccattagctcatgcagccctttgctaagctttggacctcaagaccagcagagacttagaaagctgattaccctagacagcaccagagagcttggtttcctgaaatgctgtgattcacatccatctccatagtcctgagccacttggaagtcatctgacttcagggggctctgagaacctcagctcacacacagactcagagtcccagactttgcttttagagaaaaatacaaactgacaaaatgaagaaaggagaaaggaagggaggatcaccctttataatagagcacatcttactctcagtgcatcatacaaataatagtacttttattctcccgggaaccttataagatataagtgttgcccagactcgttaaatggtgaaactgtcacttggaaatgattaaagatgttcttcatgatcctaagacacaacggggcctggattttaacccaaacagtgacagcaccaaagactgaaccctcctcagtcatgcccctgaattaaagttttcaacaattataggaaagacatcctgcatggtagccaggttagtgcagcttacccagcagtggctggagcttcctaagaaatagaatagccaacatttgtacataaattataaaaatacgaataaaatggctactgtgcagatgtgtaagaccaaaaaaaataaatatcctgtttgcttctaaaaatggattttaacagccacttatgagccctgacaacccacctgctctaccatcttggctcttaagcaagaatcttatttcaccaattcaattcactaacgggttaaaaaatatccatttaggactattttttctttcttctttctttgttctagaagtaaacactcctacaaccaggtttattttaaaaatgtgaatttgggtataatattttacagcagttgagattaaaatggcaggtgcagaacatgcatcggtcaagtaaatgaataaataatcacttctaatgtggcatctccagcattcatcatgtatcttgctgattctctgttgaacaccacagatatctcattttattttattggcaatgagatgtaaattggtggttggtagttttctgcttttagacaagatgcttatatttagagagcatttaaaatacagcagtgtggcatttgaggcatcaacattcgtaagatgatgcttgaatctctctctgatctgagcctgaatccaatctagaatacgttcttttacaaaattctgttctatctggttttcttcaacatgcaagaacaatttgtgaaagtagtccattatctttatttttttttcttaacacatgtttcttttgcctcaaacttcaagcatgcatacatagatttgtcaattaatcctaaaagactgaggtctacacaattcagactatgaatgatacttccaagaaaatagtaattatttaagtgaaatgctaagaaataagataaaagtagtttagctagtacttcatttaaaaggcactttttaaatcttaatgtttttaaggcaatattgttggtatactaactgaagactggagagaccccgtgtgtgtggcaatgtggaaggaagcagatagagcagtcaccacttctaattactggtaatttctaatattagatctaattactgatagcagggtgatactcggcctccgctggctcaacttttagagggaaactatccgcctatacccctccgggttcggccgctgtagcggagctcggaaagagtggcgcagggtcgcggggccccgccagggggcgcgcctgggggccgcgcctccttccccgcccagagatgctctctgatcacccctcttttctagagctctgcctcacttaccggcgcggtcgcagccctcagcccactcaggataatggcgacagctgaggtactgaacactggtaaaaaattgtatgagggtaaaacaaaagaagtctacgaaaagtcctcctgcagtccaaggacaagattacagcaggaaatgtagctagaaagaatcacctggaaggaaaagctgcaatctcaaagaaaatcaccagttgtatttttcagttattataggaagcaggtattaaaactgccttcaccagaaaatgtggggagacagctttcattgcaccccagtgcgaaatgattccaattgaatgggtttgcagaagaatagcaactggttcttttctcaaaagaaatcctggtgtcaaggaaggatataagtttacccacctaaagtggagttgtttttcaaggatgctgccaataatgacccacagtggtctgaggaacagctgattgctgcaaaattttgcttcgctggacttgttacaggccagactgaattggatatcatgagtcatgctacacaggctatatttgaaatgctggagaaatcctggttgccccagaattgtacactggttgatatgaagattgaatttggtgttgatgtaaccacaaagaaattgttcttgctgatgtaattgacaatgattcctggagactctggccatcaggagatcgaagccaacagaaagacaaacagtgttatcgggatctcaaagaagtaactcctgaagggctccaaatggtaaagaaaaactttgagtgggttgcagagaaagtagagttgcttttgaaatcagaaagtcagtgcagggttgtagtgttgatgggctctacttctgatcttggtcactgtgaaaaaatcaagaaggcctgtggaaattttggcattccatgtgaactttgagtaacatctgcgcataaaggaccagatgaaactctgagggttaaagctgagtatgaaagggatggcattcctactgtatttgtggcagtggcaggcagaagtaatggtttgggaccagtgatgtctgggaacactgcatatccagttatcacctgtcctcccctcacaccagactggggagctcaggatgtgtggtcttctctttgactacccagggtcttggctgttcaaccacactttctccagaaggatcagctcaatttactgctcagatatttggggtagacaaccatttagtatggagcaaactgtgagcaagcattttgaacacatgtatttccttgaagcaggctgacaagaaaatcagagaatgtaatttataagaaacaatgccattgaaatttttaggggaaaaactacaaatttctaatttagctgaaggaaaatcaagcaatatgaaaaggtaattataaattagagaacacaaataaaatgtattagtgaatcaatgcttctctagatccatactaataaacatgaaaacctaaaaaaaataaaaaaaaataaagggaaactatcatgcttaacttaacatgacatctgcttttgaaacattttatacattttaaatttatgacacagaaactctccctgctccttcctgactccagggcaggcacatgcccagtgttttcaggtgttggaggttggcagcatatgagaaggacagactgtagatgcagagttctgacatgaactgagatcagacagcacttaaattcatggttaggactctcagccttgaaatcagactaccagggtctcactccttgttccacagtttatttattcaacttcttgggacctcagaatcaccatccagaaaaggtaatcatgagaaagctacctcttgggattcttgtaagagttcactgaaaatgaaatacaatgttgtatgttcagatgaatgctttgtgcttagaaaatattcaataaatattatttgtagttaatataaagaagctatcctgccactgtttctcatctatgaagatgatctgaattataatccccggtttctaataccaaacatgcacaacaccatctgtggtttaaaagcagtcaactatagacaataaagtatgaatttcagctctgtgtctttgtagctctctggctctgggtgatttttacctacactctcgtatctaatattgatagtactgtgtatccccagagtttacaaaataacgcatttaaacgcctggcacctggtttacattggataaatgctaaagccacctcacctatataattttactgtgcatctacctgggatctaccaccaaagcttttgttcacaatctggcaccctaggtttgggaataaactgtttttctcactccagtgtggggaagtttgtgttgcatttttgaatgctggcatactagctgtatgtcagaatttagcatgttccagaatgtacttatttatgatcctgtataagataaaggttgattgtatagcaatgctcccaacatagttcatgtagtaaattttttaagttatcactgtgtaatttagggaagagatgccattttggttcttgctattttgtttatggaaaataagtctaactttcttaatctcttttagtactcttttattttacagacttgcctaagtaatagaatttagtagtagccatcagatctgttctgccagagaaaaatgtacccgaaaaacgtatcttaaaggtgctatttctctcttcccttcatgtgcaactcaatggaggccaagttatagtgatgaaaaggaatccaggattatgtgtgaatcttcagagaattctaggaggaaaacattcgatgagttttgtgggaaaatactaagctccatcacttgtgatatccaatattcagttcctttggacaaacaagacaaatacatacagttcaacataataagaatattgtatcacatccaagctgagagccaaatctgagagcacaacacattcaaaatagccataaaaagaataaaataactaggaatacagctaaccaggaaggtgaaatacctctaccacgagaattacaaaacagaaagaaatcagagatgacacaaactaatggaaaaacattccatgctcatggacaggaagaatcaatattgttaaaataaatagccatacttcccagagcaatttacagattcaaaactattcctttcaaactaccaataacattttccacagaatgagaaaaaaactcttctaaaatttatttggaaccaaaaaagagaccgaaaagctaaggcaatcctaagcaagaataacaaagctggaagcatcacacagcccgactttaagctatacaaccaagctacagtaactaaaacagcacggtactggtacaaaagcagacacatagaccaatgcaacaggttacagaacccagaaataaagccacatttctataaccatctgatattttacaaagccagcaaaaagaagcaaccaggaaaggactcccctattcaataaatggtgctaagataaatggctagccatatgcagaagaccaaaactaaattcctacctttcaccatataagaaaatcaacacaacatgaattaaagacttaaacggaaaacctaaactataaaaaccctagaaggaaacataggaaataccattttggacctaggccctggcaaagacttaacggcaaagactccaaaagcaactaagacaaaagtaaaaattgacaagtgggacctaattagactaaaaagttctgcactgcaaaataaactatcaggagagtaaatgggaaacacaagctagtagggagagagacggtgagagagacggtgagagagacggtgagaagagacggggagaagagacggggagggagaaacttttaagtgagacaagaaacaaacacatggagataagccaagaaaacagaccactggtcttgagaggagaggtgcgtggaagaagcagaggcagaaggaacgtgcctggggttgcaggggctttgcctgtcatggacacagaccttcacgaaggtgggcctctttccataccaggctttcttactacttcttggtgtggacttgtttttactcctttctttgacaatgttttccaattttctttccaattcagccctttgactccctgaaagtttatgtgttgtgggtgggaccccatcccttggtctataaggtttgtgatcttgaaaagtgaacctaattttctcaccacagcgctcaaggagtaacaaacaatccaatcccctaaagttgtataagagccactggaaaaatgttttgtctctttttggctagaaactaacgtgaggaaatctgaagcaggaccttaagcagcaatgttaccaacgtaagggttgagctcacttaaaaatgggcccaacacagaaggctagttaagacatggagagagaggccaggatctggtaccattgtgcaagccaatagttcaagtattttctgacgaagaagttcaatttccttcattagcatcgtgtgctaaacatttcactttgagattcctccagtttgggtggcattctctgacactgacctacaaaattccaacagatatactttttttcaaaaaaaaatttttttagcttgcattcagcaacaattggttcatcttattcgaaaaggtagattaatttagtttctttatgttagttttcctttttttttaaatacaagattgtttatccaagtgtcctttatagtgtgtgtctcaaaggttaatcctaaatcctatctcactagaaaagtggtgacattcttacccaagattcactgcctggttttaactttaattctttctatatggagatcccttcctccgtattttctaacagaatctctctccttattttattctttccttcctccttcctatctttctttcccataggtatttatgaaataaacacaattagccagacacaaaagtagagattaaatgtatagaactgaaaaataacagtgataaaacaagcaaacacatcctaactacacccctataaaggtgcatggtccctaagagttctaaaattcttaaagtagtccagtagcaagaaggaatttgctttaaaaaataaaactctagtttcaattccagagacatttcgtcttttcatctctactcaatattcagcagtggtacagccaatcagtctatctttgaactcatcagctgttctgaatattcttcattttctattcccgttccctgggcagttgtggttgctgtctgtgctttgggtgatcacgcacccattcagccatacaccacactcaacagttgtcagcacgtccatgcaagaaactgttgaatagagtctcttatggccctcttttagactactgttttctaatcttttgtaattatatgggacactcaatttataatcaatgggtccagaaccaaaaggaacaattctaggaagagctgccaagaagctgcattcaattacaccgatgcccattactacggggtgttttgtcactcagtaccatgcgttccaggcgtacttgtaatatttaaagtgaccaagtgtttccaaagctcaattttaacaggtctctccagcaaacctttccacctactggttttgtgctctctgccagcacatttgagttcatatagagttcagtatgattaaaaagggatgcaaattatatatgtatatggaatatatgtgtatatatgtgtatgcaatatatatatatatatatatatatctccacacacatacataagccattaagccattgcataatttgacattcaaacatccaagtggaaaatataatatagcactgtcatatacaattttttcttttgtcttagaaatatagcataacaggtcagcaggtaccaaattctttaaccttcaatgtccttgatcatggagtaattatgagtaaataaaaattaattgcagcacaagacatgatcatgagttagttttccttcatatttacaagacctaatctatgtatttgttttaggctggaaaaatagaacctattctctcaaatgataacacagaagaggcatttttattatagtactataactactacactgatatcattttgaaacatagaataaattttgtttcaaaatatggtaaaaatttcaccttttccctcctcccccagctctttatcactttctcctccagctccatcccctctctcctccccaccatctcccacgccatctccctggttcccagacacctacaccagggcacagtcatagctgttctgcttgcagaaattatttctatcatttactgatacaaactttttagtttgaggcattgctcactatcatactgtttcaaaaaaaaatacagcactaattattgctgtcaatagcaatgttgacgcctctgctcaggagaagaaagtgtacatggagaggttggaggccaaatcttcttttacaggggaaatgacattcattgggatgtggacattcgttttaccatcttgaaagaaatctttctatgacaaatcatggtcagtgatctagaaagcaggccacaaccccagaataggaaaaaaaaaaaaaaaaaactcctctgattaaaagtttgttaataagaatgatcaggtagcatgtctgatgaataaaaatgtgatgtaagttgaggtttgtgtgaaaatgaactggcacttctgttaggaatagttaactacaaaggcttacaggagtatttgcatacattttaaaagcagtttcttataaaactatcttagtgctcttgaaataatttgccttaaggttggatttatatttttctcaaaacttctggagataagtcagataagtactgttccctcatataatgctttattctctaatagacagtcaaactcaatattgttctcttcaattgttaaatatattattttacattttaacaggtcacttggatcatttttatcacactttttgtcagtaatattttgaaaaatcccacattgtatataaaaggcctaccattttgatattcttgcaatttttgttaaaagaaggtctctgcatttccttagaaatgagtgactatttctcatataggagggatttcttttctaacatccccattagaaaatcaagacactattacatttaattatcttatttatgacagcatttaaaacaaaatggttcctcattgctcttaaaatccagtacaaaatgggcagcaagtcactgtgttctgtcccctgctctcctctccatctctgcctgactctccctcccccacgtccacctatgtgctgagagattcttccccttctctcacccctcacacgcctctgggctgcaaggctgatgtgctccatagtcaggaacctccccattgtccccataccttctttcttctgctgactgctattggcccatctctcttaaggccatgtggcagagtattttctcaggaaaaaagctctgaacagattattgagccatttgaattccatgcccaaattcggggactctgaagtagtttgaatagaagcactcaatggtccaagttacaatttaggaaaactgacctccaagacaagaactggagtcaggtgatgatgactgcagattgcaggtggcaagaaattaaatcaggagttggtcatttagaacgctgggaagggagtcctactattgtttccatggtggagtaaagccagagaagagaaagaatggtgccttaggaagttgggtagaaaggtcaaagaaagatgtggggggtgggtgggtgtgtgtttaagtttctgctgtctttaatatatggaaggtaatagtgaagaatcaggtggaatagatacagcaaaaaataacaacagtagacagaaactggtaaagacgtctaagaatgtagtagccacatttttaggtgaaaagacgcttaaccagctcacatattgaggtgcaatcagaacacatttctaggtctgctggtgtcatagctttttttttttttttttttttttttttttttttttttgagatggagtcctgctctgtcgcctaggctggagtgcagtgacacgatcttggctcactgcaagctccgcctcccaggttcaagcaattctcctgcctcagccttccgagtagctgggattacaggtacccagcaccacgccaggctaacttttgtatttttagtagagatggggtttcaccgtgttagccaggatggtctcgatatcctgacctgcccacctcggccttccaaagttctggtattgcaggcatgagccaccgcacccggccagctttcttaagctttttttcaaattttctgttttttcttctttaaccataacaacacacacttgttcctcagaaaggaatttctaggataaatgagtacaatatggaaaataattatcttctgtgaactgggatccgcagatccaggcggagaggcatcctgacaggtcctccagggctcttgtcagttacctccgtacctgtgcacgccttcaggtactctgagtgcaattcataaatcacactaagtactgtactgaggcagcccttcttcaaattaaacacaaatgagctataaatggaaccatgaggtgttgttctcatgttaaggtagactgaaaatattgccactaagggaaatactcaaggctttttaagccatcactacttgatattatgttatttcttttaagcctctctgatatgtcataaagcaaagaaacaaatacagctaagggcaaggcttcaggtatttaaaatgtaacactcaccaggagagccactggcattacaaagacaagtaaatgttcttattccacaaggagtttactgtctgtggagagatccaggaccaaaaaaacttaagcctcatcaaggtggtttcgacaatgaagggaagaaaatgcaggaagaccagctccccctgcatctagttgctccaaaagcctgcatgaaaatgcctcctttgctgtgaggctggaacaaggagctggccagaggatttggcagaaggcattccatggagatgagatgacaagcgaccaacgtgatgatcttcacatatcctcagccagacccagctttataaagtttattcctgatctccctgtctaagggcatttactttaggaaacttgcatttgcaattttctcctctgcccctttgtaatgtatgtaaatatctttgagagcttcttgacagttttaccaccgagaatggtctttctcaatgacctgggagccatccctcagacacgctctcagactagagagcacccctgtctcccactcactgtgggaggctgcagacctcggctccaagaccactgattagcaaacacaggtggcatacccatggggaaaaacactgggaaacaaatgagcaaccaactcaacgtggtggactcatccattgaccatttccctccttgtaccagggctcaaaatccctcccattttttatttcagtggagccgaattcagtccccttccccttttgcaatcacggtgagtaaattcccctttgcatgtttatcttgtgcagtacaatttctcttggacaattgcaaaggtctggggtcaggcaagccgcacatatgcacacaactgaaacgctatggacacattaggtctctgagtgtggctgcatggagggggcaggacagagcggccctgattgcctggtcatcaggcctttgtaatgccacccaaagtgaggtacatcttattccataaagaaagggagactgtcagctaattcttaagagagaagcaacagattctgtccatgtgttctggaatgcagtgagaatcgaatcagagatgaatacagatgtgattgcagaggccatggaagaaatgagacaaacccaggcagcagcatctcaggctccaggcaggcagctgactgaagcccacacagtaaggacaggtttccaatgagggagatgaggtttcatcctttactatgcatggtgagttttaactgttttgaaaactatgttttaaaacaatgatgctgctcttgcttttgtggcagctgagagtgcacctggaatgaagcaggagaaagggagcatctgtgaaagagtgttccgcctgaatctagggatcaagctgccacttcaaaagctgaaaacagcaaaagcagaacacctaagtaccaaatataggtcatgtttttattatgttggcgcaaaagtcattgtggtctttgccagcacttttaatgcaaaaaccacaattccttttgcaccaacctgacctaatagcaaaaataagtacaatataaaagtacgaaattattccagggtatggggggagagagaaaaagagattgaaacagtataaagcgaagatatagaaatcatgataaaattatctgaagctaataggaatgctttccttaagattcacaagcaacaaagatacctccttaactgggataggtacatacaaatgtagaagataagtaacttttataaatgctgagactaatcattcagagaaatttaaaaatacttgtgctcatgtaacaaaaaatgtataattatcaagagaaaccatataaagacatttcctcatggattttacgaaaatcatcttaaatacttataaaattccacagaagggcatgacagatctccataaatgaagacatacatatgtgcctagactacagttttcccaaatgcatctatgcaaaattattccagccaaaatctcgaagcatttttatttttttattatactttaagttctagggtacatgcgcacaacgtgcaggtttcttaagtatgtgtaaatgtgccatgttggcatgctgtacccaataactcatcatttacattaggtatatctcctaatgctatccctccccacttcccccacccaatgacaggccccggtgtgtgatgttccccttcttgtgtccaagtgttctcattgttcagttcccacctatgagtgagaacatgcggtgtttgttttctgtccttgcgctagtttgctgagaatgatggtttctagcttcatccatgtccctacaaaggacatgaactcatccttttttatggctgcatagtattccatggtgtatatgtgcatttttaatgactaaaaatattctaatttttaagggagatattttatttttaaaaaggagatgagattttgcaatatataaaatgtctattaaaaagtacagaattgaaaattgcttactctgatatgtgaacagacaggttagtatctgacaactagtcacaggcaagctaaggtggaaaataaactctcaaaaagttaccacactgtgtgttggaatgctttttcaataaaaattcgtctaaaacctggtcaattctttcaagaaaactataccagtcttccaccatacaccaaactaattttcagaaaaataccaatttgttaaaaaaaagtagaaacttacatttattaataggtatgtaacattatgctgataaaaacctcattagtagaacttcaaaagtagaaactgggagaagaaaaataatcattttggctgcctaaagtttcatataacctctgtatatcacagatgccataaataaatgaaaagataaagtaagacctcagaccaaagtaaaaattcagcaactgtttgcatcggccattcttgatctgccctccaaattcactctccatgcttctgcacgcccacatcctccttcctcaactcctccatcctctgatatccaggggggtttccagcaggagcgtgggctggtgaggacagaggtcagggcttgcattggccgaccctgcgcatctttccttccgggccatgggtcacgcccctgggatcttgatcaactcaatacatgagagatgtgcttacataaagtcactacatgacaggcactcacaagggaataagaaaaaatgttttgaaaactgtaagagtgaaacggtaagggataacaccgatgtagctcaccagttcataaaaggaatgatcaattggtaaagaagtttatcaaagatgttcaatttaatttataatcaaagacatgactggtaatacaatgacgagtaattttagccctagatcatataagtgttttaaaatagtcatcctcagcccggccaccatggcaaaaccccctctctactaaaaatacaaaaattagccaggcgcgtaatggtgtgtgcctgtagccccagctactctagagcctggggcaggagaattgcttgaacccaggaggcggaggttgcagtgagctgagattgcaccactgcactgcagcctgtgtgagagagcaagactccgtctcaaaaaaaaaaaaaaaaaaaaaaaaaaaaaagtaatccctgggcactcacacaagtatctgaaaaattgggactttattttcactgctttggagattatcaatacaatatttattaaaaacaaaattggcattacatgtcaaaaagctttacatttgacctggaaattttacgtataggaatgtctctttaaaaaaaaaagtgacaatatgcaaagagataagtattagaatgctctttccagcattagaaactttaacctgtgtaagaaagtactcaaacattcaacagacctggactggtaaaatgaactatgcatgcagctttcgaaagcgatgcatgtaccctcgaacatgcagactacactgatgcttctcattttttctaacataagaaaagtttgtaaagacatcaatcaaaatacagtaattatgttaattactgttactattacaccaaaaatttgaatgatataaaattgaatatcctgtgtattttttatataaagcgtatcctttttgtttcctatataattgttattaatacaagaaaggaaaattggccggccgtgacggctcatgcctataaccccagcacgttgggaagccaaggcggatggatcacctgaggtcaggagttggagacgagactagcaaaacccaatcgcaactaaaaatacaaaaaattagctgggcatggtggtgcacacatgtaatcccacctactcgtgaggctgaggcaggaagatttcttgaacctgggaggtggaggttgcagtgagctgagatcagagatcacgccactgtactccaggctgggtgacaagagcaagacttcatctcaaaaaaaaaaaaaaaaggaaaattaaaaattaatcacctttgtcttaggtttaattcctgggaaatcaatgctgacacaagtattcatgtgagagtgatttttaagaagagttttctgataaagacctcagaccgtcagaggcagagcagggaaggacgcctagcaaaggggtagagtcacagacccatctttggtgcaatcccccagggggctgtggagcctcagagttgtccaggtcagctacgttgggctaagttctgcagcaaccctcattccagagctgcattgcttaaggcctctggccactttggtgggatgggcttttgggtgagacaccacctaggaggtgggtttcgggacctggggagggcacctgagtggtgggtgcagggcacaaagtccaagccctgaaacctcaactttaattcttccctttcacacatggaacttacgtcttgtactcatcacagattctgtaatatcggaaataaatctcctgattgttattttttaaaagcagacttctttccttagttttatcccaagttgtaagcacaactgcttgcctgatgtcttcaatatcttggattcaccatttaatacgtaaaaagtaaaagggaaaaaaacctacagatctgaaatgataaattcatgagccaaaataaagaaaagaaaaattggtgtcattttacattttttgtatcttaccttaaatcaatgtcttacttcagactgtctgtgcccttttcctacttctggtcatttcttagctaaatcttattgcggccaccttgaggactgatctatgactttctcagcattttcaggtcacctttaattgcaaaatgaaatatgaagtatcacagacaaggagggtggaagtggaagatgtgagctataaattgctgctgctgctgccagaacccagtactgagcagattcaaagtgagagacaccctctccccgtgggttctatttcggccagtcagctactcttagcggacttgacagcctcagatggcttttttttttcttttcttcaaattgaggggcgcaagtacttaatgtcattttgaagggcagcagttactaaattagaaacaaatcttttctattaatttaactcttttgcatatctcaatcatctcagttagtgagcacctctatgccgctttgacacactctggattctgaaaccatctttatctacaccagtgtcctcagcctgtccaataatggagccctgtccttctacacaaggcagcctaaactacccaccaccccacattaataataggaaaaacacagaaactttgtgaggcaaaaagaaaaaaaaatacaactgagagtaaaaagagaaatgaatacagctactcttttctaaaatgacaaaggatagaattattgtttcagactactgagacttggcaagcccaatgtattttaagcataggtactatttgcaaggcagcattcgtactgtgattcaaggtaactggtacattttgatcatctcttcctttcatatttactgcatccatcattgaagcaaggctcagcattttgcttccctggtgtagacagaccatttgcaaagggcattaatggacgtagctatatagcctagttgaagttgatgacatatagaaaatattaagtgtccacagacagttttaaggccatctggagggatctcaaaatcgaagagcaattgcacaaaggaactcatttagattagttatgctatctataggatgctcattttgcatcaaagtacaattggcttaaactagtagtgtttgcccttttcccttttcctctgcctgcctcagccaaggcttcgtggtttcaggctcatcttgacctatgactggtcctccaactaggaacaagcaaaatgagtgtgtgcgcgcgtgtgtgtgtgtgtgtgtgtgtgtgtagggatagtgagaagcatccccgtggttaacttaactttgggaattaacctttatcatgtgtgccatctcacagtggacttgaaaacaaaccacgaaatcaaacaataaaaacaagacaccacttaagaaaagacagagtgtgaatttccaagcaacttgaaactttataatttcaaactatagtttatgaagagatcacaatgtttttttcttacacttaattcacaatgactctaggtatcctgtctgtttctaggcatggatttccatgcttctgataactttgtaatacctcattaatactgtgaaaggctttgttttcttgttttgatattatcttccaaagagaatgtttaaatatgtcaacaatcatttattgttatactcattctcgcttcctgacatagaaaatccgtgacgtcatagggaaggacagactccaataatacttagtttttgaaaaatatagtatgtccttagagatgcaaatatcatgtcatatccgtgtgttttcaaatcgtgtgacattaaccactggagagaggcagaataaagtgatcttagtgctggcttctacaagaaattatattttcagaatctttatgttattagagccagcagtaaagtcaccagatatcatttggttttctccggtgccatttctaattcaataaaaacagatcttgatattgtgttacagaaaagtacaattgcttagtcttatttaaaagatcatgtatatgatttttttgcccatacaatggactatatatgaatataagctatttgttaatattctttaagttgatcctggccactttccaaagtgaggataaattccaaacttttgaatataaattcatggtttatggtttactgagaaatgttatccaaacagaaacatcgataaagcaattccctttagtgttcagtgaagaattcatggaaataagccttcgaaatataaaaagggtttcagttactattaactaccagtgatgtactcaacatagttattagatacccagtctagatttgtctcttgtctcttttataggaaggggttttgcatgataggagaggagggttaggggtcagaaagccctaggttggaatctgcccgacattcaacagaccagaactaccagagacaaatttgactgtaaatctcagctgttttatttataaaatcgaaagccaggattctactattgttttgtagatcttaattactgaaaagatctatgtcttctatcctccatccaatagaattcaaaatgaaaacatatcagtaaaataaagttaagctcatttctgcttttttccacgaatgtctattctagtaaccttttaaaatactaatataatttttttcaaagaacgttattggtatttatttagtccttctctttgttggtgctctacatttgagctcatagaatatccttgacacagtaattatgtgtgtgttacatattttttgtaagaatttaatgagagccaagtgttaactgcctgagaaagcagctagcccacagagcctccataaatacgatgggcattcatgcaagacaagtctttacagatgtatcgtaagtcaaagacggcaggagccacaactctactcacatattggaaagccacatcttttaaatgccaacaaaacagtattaggggtgtgttctatttcatggttatttggttatttgttcaaccattaaaattatttccacaataacgagaaactatttcctttatacatcaaaactagatgcccttgtattctgaatggaaccaaataatgaattaattttcaggaaatttaaaccatatttaactagatgagttaaaatacaccttctaaagctccaggaaaataagcctctaattattgaagctggaaaaccaacagagcagaagcaattaataattgaaaaactcatgctatggaatgttcagaaattttaaatataatagagaatcattgattttgatgcaggtattttaagacgccaaattacaaagctttctatgcaattactgaataaattgccagtcatatacagacttcggtgtagatttttttttttttatttaaaaagggattcctgactgactttatattaccaccagacaaaagaatggacgtgagagagagagagagggagggaggaacactgggagggagggaattagggagggaggaaggaaggaaggaaagtacgaaggaagacaggggatataaaaggcagagagagataatattacaaagaatttttactgacttttagtgatcaaaatataaaaccaatattatgttcatacattatatccttatgactgctatatgaaatgcctgcaagccttcaagaaaagtatcttagtatttgttctgtttacatgatacaatttattcctaggggacctaatacagatatgattactgatactatttaacaaatacagacatggctcattgtctaacagcctgtacccaatccttctctacatatgcttccctaataaaagagaaaagaaaacacttaaagcggtttacttaacaaaaagggataggaacttgaaattaatttccacttcctggtaaacacataggattaatttaaatctagtagaaggtagaattatacagaaaacaaactttgtaatggagcagctccaatttggagtttcaagtacccaagtatccaactgataatataatactggcatataaaatgaggtatagacctgattctgcagggacgatgttttttccccctggatgtcagtttactcgtttgtatagagagataatatctgcgataatcatagtcctaaaattatatttcaagaatatatgtattgcacctgtccatctctttcatggatgtatttagtatatctttttattctatgcaatatgcttcatgttatagaacacttcaatatcctctgaaaattgtgaagcactctgccaattcgtggtcttattctcatggtgatctaatgtgataaattatttcttggtcttcatgtgaccgagtccttgcctactacagccaggaggctcagtgggttgagaagcctgcgtcgagaagtcagcgagtgaaacgccaccactctgcattgtcactctgccacactccctcatcacatcacttaaccttcccctctcacttgctctaaatgtgaaatggagaggaagacgctgagccaaaactgaggaagtgctacatacattaaattacctagtgcttgtgaaccatctttaaacacataaattattttaaaataaaatactttgcatgcagatgacagaacagacctcataaagcattatattataatttgttcaaattccagaccctgtcatattccattaatgaatacaggatgattcagggtgaacacgttgagatgaaatgtggtcctggaacatggaaaactcgaaagtggaagctcattgtgggatgcagcacagatatgctaaattattgtgaacgtaaccattcatggtgactcaaatgcgatggcttgtggacctcagagcagtaaacctgagcctttgctagacgattttttaattaccaagggcttttctttctcacacaaactaaatactcaaagaattatctgagtcctcccatgaaacagacagtgagatgacggaaacccggattttcggtgtcatttacagacccacaatctctaattttaaaatgaacccagcaaaaacgtttaattacctaactttcaaaagtctctaggaagtgataactcaattgcatgtgaagcacccagacagccacactctagacaaccaccagctctctaggtgcaatttcaaacctatagcttactgaggatcatgcagtgtgcacatgctcggagacctgacccaagtcccgctacaccctaggaaggtggcctagttccaccctagatgggaggctggctctgtcagttttcagcgttgcagtattgaactcgtgtctcacctccagcctgtggatgaagcaaagttctttgccataaaagtcccctggatgatgttagtgccatcaacaccctgcctgcttcccacgcccatctgtgggccatctatttagtttacattgcattcacttctttcctctggagctcttttcctgccaccgtgctactagcatattaacaaagagagaaatcttgacgataatcatatttttcaaaaaggtaattaactttctcttctcatccagaaacagtaattaaaatcatcctgaaaccatacaaagaaaagaagcatttgaaccatggtcgcagtgcctgtgagtttcatgtagagtatgctttgttgagcccattcattgaacgatgaacttcatttgaaaaccacccatttgatcacaaaaatctagtcctgtgacaaccttaaattctcatgctatgaatttgagggaagcagtaaaagatgaaggtgtcataaaaaaataataaaactgcagcctgaaagatggtcttacccttcctaggagttgaatgagcaagtacagatgcatgcctgcgctcttaagctattatttatgttcaattctatgtggcattttgatttttcaaaagaaccacatacaaagactaacttcaaatgttatctggactacctcatcatctcaaaatagacttatcttgaaatagaaaaagaattaaatatttttattctttttaaccacagactaatacattctcatagaaaattaatgggaaatacagaagactactcgagtaatttaggactgtgattaaagtggatgacattattgtacccaacttttcattcccatctgcctgtccaccactcacccgggggttcggcagcttctcccacagaaagcaaaccttatttcccagccacattgactttggacatggccctatgacaggcctcggctaatttccaagggtagggtgacagcactgacttaaaacctattcagggcagtactctcctgagcttccctcactgccgggtgggaaacgtgctccaggcagccaaacattctcacaaaaatgaaagactcatggggcacacttgagctgaaaccttgtcttatagccaagctgagcccagcccatcctgaatcacctaaaccccagacaaaccagagagcaggacaccagtacgtgttcattgttccgtgggcctgagctttggaatgggttgttactcagcatttttacagtaatagtaatgacagtaataatcctaatacatatgaatatacataatactgtacatgcacacgtacatacatgtgtagatacactataaatgttttcttatatgttaaactgaataaaaatactacctgtagtcttctgttaagaatcatatcacagtatgtaaactatcagctctatatctgacatagaataatggatccatagaagccagccataatattaataataatagcaagctatgttattgttaatattactagtaagaggaggagtatattctcaaaggtctccatgagggaagtacaagctctctttctactgcttttctaaattcaataaagcccaccctcagtaggagttcacttggaaaaacttcccaaacagtaaaatacaaatctgttgtgtatcccattgctctcgcccatagatagcacatctggttgacttttgtaaataatactcgtgtgggctcaatgtccttattagcatgcttacttgcaattatgtttcctgggtgctacacaaaagaggaatccaccaccacgattccggcggtgtggagtcacagagggcggcaggcagattggtttcattgccagcaccagtcggtcagcagcggtatagggttgctgcattaggaacgatgatcagagcatttactacagatgctggttgaaaaagggtgctaattatttgctttaaagaaagtgtgtaaatctatctttccaccaccccttcctgcgacaatcattggtagggcactatctagattatagacccttttgctaagttctgtgaattcaaaggaaaaagacggaaacatggatctaaagaattaagctcttgtaacttacttgaagcttgtatctgtactctcaaataataatcatagtgaataaaacacatcctcttggatcccttgtggtagaaaaaggctttcagtgatacaacttaatatgttcctagacacttatcataatgggtgtgatactaatggtttcacccaaaaattaaatagaacacagccagcaatcataccaacagcctttggacaatcggtttcaaccatttagaacatactggtttaaaaatctactgtcgcttgaacacgcccactcagaaagtttgcctaatgggagaacattaaaacataaacttatttagaaccttggtatcatttttcatattccccaggccaacaggcatgtaataaagtgatagtgctttcatgatttaaaagttatctctccatgtctctccaacaagtctggatccaatattctttttctatgtttacaaaaaactgagctggattatttggggtcagagatagaaatcattcttcaagaacataagagatccagaaaatcttgtttaaaattggaggacattttgctcttgatcttattgagttgtcttgccgagttttactttccagtcacacagatgagtacagcttcactgcctctggctgcagaataaaactgaatgaaacagatggaccttattaccaataaaaggagccatagctattaattcagggacaactgttacatacattcatgataaatacacgtcttgatatcatctgaattcactgatattattctttaggagaaaagatagagttttatgaattaggaaaaaatacttctaatgaagggcaataagaaaatcattaaatgtgttatacatattaataatattatacatctatagcaagagtttccggtgtatcaccatgggatgaaacaactgcttctaaaatctcccatctgatactcaacattttaagcagtaaggagtataagttaaatttccaaacattacctgcaatctaagaatactgtatgtataaactaacaagagacttccaggggattgccaatagacatgaataagaatctcagactaagttctactcttcagtaaagaggccttaggtttaaaagcctagacccatgagctctactccctacagctagaccaaaaggtaaagctgtgctctccagtagaaataatatgcaagccacatatgtaattttaacttttctaggggccatatttaaaaaggctaaaactgagtttgatatctagcctagcatatccaaaacatctgtcatttcaacatgtaataagtgaaaattgagataattcatgtttttttacactaaatatttgaaatatactgtgtattttatgcttctagtacatatcattgtggaccacctgcatgtctacaactcaacagccacatggggcaagcggttgccatattaaacagtgccattcaaatccaagtccggccacttaccaagtatattaacctaaatcagtttcttcacctgtttcttctcctgcaaacggggtaattacagtattgtcaggaatatcaagtgaatatatgccaagtgcttagaatgagggttagctcaatataaatgttatacaaaaataccagttaaagttagctcatttggtaactatttccttagcctttagaaacacaaaaccttagttaaggatttaagcctaccattttatataattctaaaatattttatgtaaacttcaagaactgagcagtattaactcacatccattccctgtcatgtattaaaagtaaatggatgcagatttttcatttatgtgaaatgatttacctaataaaattcaaattgattttctcatagtcaaatttaatatgttcctcaacttatttttcttttgtaaatgcacagcttgcatttttgtttttgacttttgataatttattccatagccattcataacgtgattgtaccttcaaactcactatgcagggaaactaaacaaggccttttcttgctttgccacctagtaccacccgagtcatgtttgatgttattatttggcaattgtctgtaacacttagtaaaatacacgtgtgtgtgtgtgtgcgcacgcgcgtatgtgtgtgtatgtggggggtggtggctgtgtgtctgtataattgctactttcccttaggggttccaggaaaatatgcagataatatgattttgtattacatagaaaatttcatagaaactttataatgttccaatgtcaatgagattccgtcatctggaaattttcataattcatatgtaacaatatatttgctctgaaataattgaaaaagctgaagaaagtgcctcgcatatcaccaatataataaatcatataaagaacgaagacgagaactttataaattagttcaaagagatcaaatgatttataagaaaactgtaacagccttgtgtctgaatcagataaaattaactgctacctctcctgaaatatgagattaaagaatggcataaaatagtgatgatattaaagacaagaaagtaaagagatatttgttgtaagagtttcattttctgtactattccacccagtgaaatgggcatcacacttaaacgattaatcagtaaagtaattcgaccctgttagagaaaggtattctgtaagtggaaagcatttttatggcaacacataaatgatcaagtgagaaaaataaggctgtagtggcatcaaccatcactgcttcattaatttctcctcatttctggaaaatggtgaatcacgaggttcaacaagagaactgaagacaattcaattttattgaatttcaatttaacctgcttaaattaggaatgtcaaacctagtattaattgggaatattgactcggagagagaagtttcttctttcaaactaccttgagtattggccccctgtatttttaaccattaaaattagttttttttaagtaatgtattatgttgaatcatataaaattgttgctatttgattatttttgttctagaagaatacaacttcaaaaaatacaattttatcaaatttaggggattggtggcaatgtattgctgccatagaaacaagaggtatttcccaatattgacatggaaaaataaacacatgtgaggctcatcctttggcaataattaaaatgtcttataacacattcacttcaaaattttgatggggctgtcataactggactttttaagttgaaatgatttctattggctcattgagtcacagaaataagaaaaaaaatgaatactgattcattttttttgcttcgtttaaatcttttagtctctttcaaacattcagtttattttaggaatatggtttaaaataccaagttttgcatagacataggaaaagatgtgattttttttcttctatgagacagtgaaatcagtgccacagctgcctcaaatcatagaactgttccctaatgaattgactgtttctccgtatagaattttctgataggcgcattagaataagtcatagaaatacatgctggttttttaaaataataaacgaaagacagaaagtaacagcttccaattacagcaggagtcaagcccaagaaaagacaaggtcctgtcatttataaaactttggctttgacatcatcgaaaattcctacgcagctggacaggagtctcaggaatgagaacacaaccaattatgcccttctgtgaagctcactggctgcttcgtgtgcagcgagataaacacagctgtctgttcactgccttgcctacgtctctaagtgagacacaaccagtcgaagtctgtatttcacagatgaatagttctaagtttgtcggggaggtgggggtttttctcccagtttgggatagtggctgcttccaatcaaagacagatgcttccagtctttttggtacaaacattcagttagatagaaggtataaattctactgctctatagcacagagtagtgactttgtcaatttctaagtaggtaaaaagagtacttgaaacgttcccgacacatagaaataatacttaagttgacagatatcccaaataccccaaatttgatcattatacattctatgtttgcaacaaaatatcacatataccacatgaatttatcaattatatattaaagtcaatccaagcaagctttttttaaaaaaacctacatacaatattttcatagatcatttaaacaaagattcttattctctataatttagtccattaagcaaataaaatatgaaagaaacatgtaaaaaatactattaaaagaaattgcctttcttcacaaagcatctggaaaagaccttgagtttgtgttctcatgcatttttgtagatgctcttatggaggaaaacacatttctaatactccacttttcatagggaatctattgttattgatatgttatcgctatgttttattacacccttgagaaacaggtaatattgcttgtatcagtttatagcaacactaaatcatgcatttcttgacaaaaatgtaagaataaacaattccacaaaaatagtcttgcccttatttatctgttaaaactcacaccaacactggaatccacaagaaacaaaacacaaacccatttttaagatccctctggcagaggtagatatttatgcatgatttacatagttgagaaaaactatttctaaaaatatgttaagctctcgctaaatccctgacaaaagcctcagtcactaatgcatacactaaacgaaatactgcatgttttgggcttaggaatatattcaaggagcaaatgtgcttagaaaaatcaaacatgaaatgcttgtagtaatgatctttctgttaaaaaataaacaaatcactccccccacagagccggggctgtgatgagaaataaaatttgctaagattctggaaaaaaaaaattaatagaacataaagctgccaccaagcccatcttaaaactttaattttatggaactcagcctaccagtctgccttgttttctgtattcttcctagatacaacagaacgtatcaaaaaataaatatcagaagctgtctgatttgctttttatcctaagcataatgagcaaacaccagtgaatgtgttaactctttccagaagccctagagaaacatgttcatcaaagttcaaatctctggcaaacatctttgccatgtttctaaaagggtctccagagctgtaataacatcaatttacacgttgcaagagagaatgacacactattaagagattcaagaatcctcagtaattcaagatggaaacaggataaactaccgacatacagactttaagaaaatgcattttggagtaattttactgttgcttgagaatgtctagggttgccatcgaatttcatcagatacaaggcagtaattccagagtgcatagtagcattctcaggttttgtgtgttttccattagagaatatttacaagtaggtcaatctactctaaatttcttaaatgtttgtaattatacatttttgattaattatttagtaatcagtgattcataattaatcaacaattgttgcataattgattaacaccctttttgagcttcatcacatttaaaggagaaagtaatgtacagttttgatggcaataacctttaaaaaataatttcagacaaaacatttaatcccatatattacggcctcagcctatttcttggaatatataacgaattccgtgaaaactgcaagaaaattaggtttcttccatcttcagaatgattttgtgtgtgtgtgtgtgtgtgtgcgtgtgcgtgtgcgcatgtgcgcgtgtgtgtatgtgtgtggtgggggatggagattcgctcttaatggccaggctggagcgcaatggcacaaactcagttcactgcaacctctgcctcacaggttcaagcaaatctcctgcctcagtctcccgagtagctgggattataagcatgcaccgccaagcctggctaatttttgttatttttagtagaaacacggtttcaccatgttggccaaggtgatctcgaactcctaaagtcaagtgatccacccacctcggcctcccaaagcgctgggattacaggtatgaggtaataataatagattaattatagcccagaataatgatttattcaatgctttaattaggcaaataataaagctatattttaattagtattgatcaagggtcttcatgtgctgtatactagtaggagacttggtgtatatgggtgaacacaacagcaaatcccagctcatgcaggtgtaccctgtgacataggtttccagtatttttgtcctaacattgagatcattgataaggaaatgttctaaaatttcaaaatctatattaattttagcttactgtaataaggtaccccaaaattataatactgcggactcttaatcatttgttagatactattagctcatatttcactgataaaaactatataatcacaaaactacgtatttggttgaataaacattttgcattatgactgtttattatagagactgatggatcctcatatttcataaatcattttccgttttttaaatttattaattatatagaattagtttaaatttccttctgaattatgacttgactggaggaaattaggtagtatcccgctgggtgacctaaatttgaaatgacagttctgactcaatcaatgacatctaggtcaatatcaggaagagttggaacgtgtaataatgaatgtctccagatcaatagatttgaacatgttagaacaaagttttgtggtttcatcaaatgattatttgatgaaaccacaattaacaatttatttgaattggcttcaaaccaatctgcatttgtgtccttccctgctcagccttctgagttaggcaaaaggtatgacatcacagtcccactgtggacagagccagcttgtggacacgtagccatgtggggctactgtactgcaatatattaagaaaggaaccgggcttattggctcaagcctataatcccagcactttgggaggctgaggtgggagcatcacatgaggtcaggagatcgagaccagcctgaccaacacagtgaaaccccatctctactgaaaatacaaaaattagccaggcatggtgacacatgcctgtaatcccagctatttgggaggctgaggcaggagaagcgcttgaacccaggagatgaaggttgcagtgaactgaggctgcaccattgcattccagcctgggcaacaagaccaaagctgtctcaaaaaaaaaaaaaaaaaaaaaaaagaagagaaaggaaacctttaaatctttttaaaaggagtttatataataaacacattttacagatattagtaatttatcttataaattattcaagtaatgaatgcctaaatgttggctcccaagaagggctgtggttgttttaaagagtgggactgctttgtgtgaattggttatgatctcatctaggctttctaggaagtagattttaaaccagatctggaaagtggattaatatttgaaaacggaaaaatgagaaaggcattccagaaatgaaaagtacaaaaatgtcacgctattaaggaaagcaggtgcagaggcttaccaggtgcacagataaacacagcaggactgggtttagggagcagaactgggcagaatgtgaggaaggctgatcacagagcatcagacttcaagtttgtctgaggctttgcatgctttggctcaggttggtcactaaatcacacttgttatttgctttttttttgggacagagtctcgctctgttgcccagtttggagtgcagtagtgcaatcttggctcactgcaaactctgcctcctgggttcaagggattctcctgcctcagcctgccaagtagctgggattacaggcaagcatcaccacacctgggtaatttttgaatctttagtacaaagcgggagatggggggctgggggcactgtggggtggtggagtgagggcggttcaccatgttggccaggctcgtcccaaactcctgacctcaagtgatccaccctcctcaggctcccaaaatgttgggattacaggtgtgagccaccatgcgcagccaaatcacggtttctttctcattttcattcaacacagattttaatcaagagccttctgagtgtcaagcacagtcgaggaaccaggcgaaccatgtgaacacctgttcccgaccgtatggctctacaattcccactggtgaaagctcatcagaaagcaggacttaaacttctacaaagaagtgatttccagatgcaaaaatcaatcaactaggaggctgttgcaggactcatctaggactgaggatggggatgaaggaacaggaaaagatgggagagatgtcacagagccagaactgagagacttggcaattaatggtatacaggaagcaagtcatatgggggtctcagaaacagtcacatgccctctgaggtttggagcataacaatcactcccatctactgccagaaagggaattgcattgaaggacagctaccatttaacagtaaagaaaactgcaccaaacacagataagagcagagggctcagaggctcctggcagggaaatgcgtgttaagatttatagacatatatgaagaactagaccatgtatatacaactttattatgtgtatatacatgcctccatgtatctgtatataaatacatatcataatatttacataaatacacacacatgtatacacactatactcatgtataaatattactgtgctcctatatgtatatgattttaacctagatttgcagttagtgaaaaaatatgaagattttcccactaatatgtgtgccaggcctgcccaatcaagctatacattaaggtggctattattttcttcaagctcacatttttaatatgctaagataaaacatctataacaaattaaaaaaatgaggcctgcttggcaacctacgtcaagtctctggcacagcacagcaagtgttttcatagaagtaggagcaagacgcaccttctctagggaggaggcccaaagggcacgtccaatgatccagttcttattccagccacaggcaaaaggccaagacactactgcatggtttccttttcaaagtaaaattataatttcccacattttgactttgctcatgcaatcaaaatacaatttttgaatcaaaggaaacaatttaataacatgcataaaatcaatggtattacagggcagatgtatcaaaagataatgctatcacaatcaatactttaaattgcataattttgtttgtagtcgaattaatataatgcagctatcacgctgagtaggtactctcaatgtgattagaaatacaccatcatgagtgatatataagtgcagggagcttgtaactacaggatcatttggtgaaaattgaaaatagttaatgatatgatagagtttcagcaaagaacattagaacaatcagcaacaaatattatctgctcaaacattatattttaatctgtctaccctagcattaggtacagttaaaaagttaaatttcacattgaggtattatgcatcattataataaggttcagtcagcgtcacagtgaccagcactttttatatatgaattgcaaggtaaccaactcaggaggatgcattgaactgaacacatgtaatacagaactaaaagtcgggaagcctactcgtaaaattgcataatttatgtgacaaatgagatttatatattctcaatatatcatatcaccatgagttctcctgagcaaatgttttaaaatgtatagcaatagaaaaatcattctttgtaacgattttctcgtaggtcaccccgatttagtctagaaaagctcgatgaaattgaccaaagctagattacaaaagtataaatttgagcattgcctgccacagtttaatgttccttcaataagtgccatggaaagctccccttgaacaatataacatcgttttcttttcttaacattctgattacaagagagctcagtaaatccaaacttaaattcaacctcagcaacaattttgatttagtttagcatacattaaatacatacgtattaagaataatattatataggcatgaatccagagacacacacacatgtgcacatatatttccctgataaatcatgtgtcaggccacttgtcacacccttgagggaaagtgccagtaaaaggaaataatatctttagagaaagggcaaaggtatgaataaattaataaacatttagatgaaaaaacaatcatcatgtagcacagaaagtgcaaatgcaaacataactcatagtctgattataatagctacacatcgcttggtactttgtaaaacaaaagtattttcatttcattagagactcaccatggaattatgcattatcatttttcccacttcacagataagaaaagttaaactgtttactaaagaaagttcagtttaagtggtgagaacaaggtttggaaatgggtttctgattccaagacctgtaatttatattaaaactgtgacttgatttcttcatttgcaaaatgaaaaaaaatattagctatgtttcatggctggtgaggaataaatggcttggaagacacagaatacctggaagagcagctcagcaacaacagcacttgcatgtcacttgctgctattctatcgaaaagcaacagcagcaggcagctcatgcgtccttctgctctactggtgtccttccactctcaaggaacacacattcaatttttttgacagaagaaataataataacaattattacaatattaactagtatttggcattttacaattaacaaaaacaaaacctcatcattaaaaacttgttcatatgatttaccaattgtattagacaacatagctcatattcacatagggaatatgtgtccatttacttgacatggaaataggcctctcaaatttgtttcattttatgtcattctgcaagcttcatagagcaaataaaatttcccaactgacttatagaaatattattgccaaattgacatccaacataatacatatatgctatataggaccctatattaattctgattttattttcccttgtgttagaatctcaaattttgatgactgtctcataagtaaaatgtgtgtatcttgttaagcattttcaaattttctccttttaagattggaatatcaaatactccatcaacaaatatcatctgttgtcacccctgtctcagtcttttgtaaattctgtcccagtgtttctacagagttcttacagataaaaccattgaacggaaaatgctcatgtagagagggacctggctgcttttccatgaaacaggagtcaatgctaagggtggggctgtttgggtgtggaggttccattcctccaaccagaagagcaaacgagtgtagggaacccttctctaagggaagaactatctgccctgtggactttgggggtggggagaaccatttatgttatcataagtaatttttgaaatatctacttatcaatcaactaattggttttattgtaattggtaaacctatgtaattgttctattcatcaacatgtaggtctccaattccatgcttctcttcctgaaccacagcagtctatccacctgccttgtacctctggtccaagaaagccacctaaggcaaatctgagctgggacagaggctagaattcttgcaccacctctctgtgaagggagagctactcaacaagctgcatttaggcagcatcctctcttggcctggacagagaatgatatgcattattgaattgtagcggtgacccgacttcacaaaaaataaacactacagactgccaggaacacagggctgggcacagttagtgcgccatagaagcctgagtattcagaagcattataaaaaggtaagaatgactcatatgcacttctatgatttttaagcattttaatagagcttgcttggcaattaaaatatacacgagagcaagattaaatagtagccatttctgcactggttttcctgtcaatgttaacaaaaagcctaccaaagagccataaggaaatggccaacctcctctcagaaagacagaagaataataagggaatgatccaagtgaagaaaaaaagtgagcaaagaaatgcgtgaaaacaaacgggatagctttctgaaatcactgaagtaattttgagttgaaaaattcagaatgattcaagcctgtgctttgccatcattcaaatggctgtatcatttccttaacaaggctgcatagctcatggactaataaggatctaactttgcattcaggcataaagacatttattcctgtttttcccaccttattaatatgaaacaagacaataagatgaagacagtaactgtaatacttgttgcaagctaaatactaatgcaagaataattgttgttactacttttatatggaggtgatttgagatttttctcttaacttgcagatgtgtatatcttcatgttgcttccatctttcctcaagctttactttcgtagtgctcaaaaatggtaagagacacaatctgcacgtagtcattagaatgtctcagatcgcacggcttagattgctccacaccaagaagaacaatgtggaggggaaagagatcttccttaagtgtaaaaagataccagattgatacttaagatctcggttgtatcaggcaagacgccgaaacttctctgagtcacagatcctctcttctctgtaatcacgtcactgtgacattcaggtcacgtcatggaaggaaaaacattcttacaattataaaggattattacgcagactccagttcaaattgaggcaaatatgaataggctgggaacatgtgccagtataatccaatccatttaagaatccgttagtcagagaaactttatccaaatagttaaatagctccaaagaggtgcgtttatccccataaagcaaacctagatttttcttcttcagtgttttgatagaaaattaaggtaaaaatctcatactacgcagtaagacagtacagggaacgcacttttctcatatttcatgcacattcttcatgaattatgaaatatcttacagtacaacacaaagaaaacttaaagcatcattgaaatcccctagtaatcagggctcttcctacagagtctcatgcagcccttcatattcagaaaaatagggaagtttacttcacctaatgggaattttgaaaggaaatgatgactctgattcctttgaagaaagagccctattcattttggttgaattccaagcaaaatggatgttcttgtgttataagtgatgttacctttcctaacactatattgatgttacaactctctagcaattgggtacgtgtaactaaataaaagccaacaaactcagatcagaaaagctgagcctgtccccactgcctccacacgcttctgctctagcccagctgtaaaatgtgtgtaatcacatttgcttgcctgcttcaggtatttttaaataatctaatcgaataaagcttctcagagaatactacgtaaaataaagttcctctgtaatgcaatgacttctgatgtcatcactactatgggaattattacattccctctttcccttttctattctcttcctttcttttcgggttcagtaaaaaaattaccagaacattcacatgcttcctatcttccctttttgaaagttaaatgttataagcctctgaatttacttctgtgactgtgcattccagcaaagtaaaataaaattgtgtgtgattcgtgggggtttgcaacttactttcaccgtaccacttgctaactagaggatccgattatgggtcttgctgtcttaggacaccagataccactgaagccttgcccactgcaggttactgaaatctaggtttatgtttagagaggacaaaaatgtgttcattgctttatttgacctcaactggcctagtttgatgatttttttaaaaagataatctatatgcctttaagaggattccaaaaaatgtaaactgtcagtttacgtggattgtaacccgatggagatgtttctcatttacctgggccacaggataactaggcagttatcccacctgtgacttaaactatgtgcaggaaaaatttttacatttttatatttttagcaatttttagcaatttttacatttttagcaattcatagaaaacaaaaaaagatacttgagatactttgttcacagtatttatttaaaatataattagccatatacaatgttgtctctcctatatgtaagctttcataagaatgattcactatttttatatataatactgtttttaacctctgggtatggcaatcaaatctttttagaaaatatttcttggtttgatgaaaccatatgtattttgtcccttctgtaattttctccgtcagattgtctttttcataatatgttatgttaatgtgagaagtgcactgtgtactttctgtgactaatattttgttttgataatttattcggactttgcctctgatgatcccatctagcaaccatttgggaaatccagtaattatttgtatttcacaatttgcagttctcattccatcactgtgtctgtgaaatgcatttttgccactctgtccactaaatttattttaagtgatgtcttgatacagcatgaatatactggtgtcaaactgaagctactggatgctttatgcagcaatcgtcacaactgctggttcctgtcagatctgtttaagcctaggttcttattaggtttaatccaaatgtctaaactctttaattgcctaattcttatgcttgtgttttccaatgttgaaactcttggaattaaaaacaattaattattttttccagattttagttctgtgatgacttagtttttaaaatgtattacaattacaattacactctacaagtatgactttgaaaaaaaatcaaagtagttcattaacttttcttacttttcagctacataaccttagtttcctcactcactggtaaaatggggtacttagggcaaccgaggattccatagaataatgcatataaactcacttgcaatgtacctcatctatactgaaggctcacttagtccaagccctcgtagtatatgagcccagtacacacagcaaagatgggcatttgcccactcaaacatacatcgaccccctactacacatagcctttagaaagaatagcaataatcacaacactgacatataaacaagtaattctctatggtgagaattaatataatgcaatacagatactacagaagtgaaatgagttgaaaaacttagccagtgtggtggtggtggcagtgtgtgcacaagtgtctcatggagtggtgagtaggggagaaaaagaaagctcacagaggttgaagataaatgaggcttgagagaataaaaggaaggcttaatattgaactttgagagagaaatactcttaacaagagaagaaagaggaaagagcattctaaccagagaatatagcacaaatctaagtgcacacatacacacccacgcatggacacacacatatacaatcatggacacacacatacatgcacacacaaacatccatgcacccacacatgcacacatacttgcacatacacaaataaatatccacacacacacacacacacacacacacactctccctctcacacgtacatgtaaggaaatggggaaaaacaattgatgcctatatatatttttggacaaagtagtttaattcattctctacctataacatgtaatgttatagattagccaagaaagagggctagagatctcaacaagaaaatacatgaaatacacaagtttttcttgggtacgtatcaattgaaataatactttgtgttatttggttgggaggtagatagtggatgaaagtctgaatgatatgcagagttttaatttaatgtgaaaagtgattaagtccctgagacctctaagctaacatgtggttccgggtagaaaaattgtataattaaagaagactatttttcttgtttaaagaaatagaatggtttttaaacagagtagtcccaattaaaatattttgggaatacaagaaagttctattaataattacaccacggaaacagtctcaaacaagacagtctttcaatttcaaaggaattagttgatgaggtctgtgtatgtgtgtgcgaacacacccaacagaaggaatctcataacgaaagtgacaatttttgcgtacacatttctatccactgaaataactgctgacatcatggaattacttggaataacactgctggaacttgtcactcaaagacaaaagctaacaagagtaataattagtattttaatgtactcggaggaaatgaccaggtatatagcctatatttaagaaacaatctgtatctccaagtgaaatgtcattgtaatagaacgtggccacagggtaatgggctgttactgctacacaaatgctaacgtaaagccaagacatttctcgggaatcaaagtagaagcaatcaaagaatctctttggaaagtgagcgaacctgaatgcactgccatgtttatgacacttaggtttttatcctttttgaagtcaagcttctctgcagtttattctctcccattttaaatactgcatacatttataacttgatgaacaacacaaatcaaggtaattttagatttcaacattttctacctgaagaagtgggataaatgtgacttatctgacatttttgaagagatgtaatcaatattcaaaatactgcacgtttaatatacatacttggaggcatttgaaatatgcatacacccatgacacaatcaccccactcaaggatataaacaactattagctgtcagtgttttatcctgcacagatattttcttgtgtgcggtaagaacactgaccttgagatttattcgcttcaccagttattcagcatataatgcagtgatggtgactctaggcacagtgtagaccagcagttttctagaacttactcagtttgcatgattgaaactttatacctcttgaaagatcgcccgatttttccttcccctggcccctggtaaacacaattctactctctgcttatatgtgtgtggctgtcttagatacttcatacaagtgggatcaaaaagcacagaaaagaaaagaaaaagagacatgtgagactccctcaaactaaaaagcttctgcacagcaaagaaaacaatcaatccagtgaaaaggcaacctacagaatgggagaaaagatttgcaaaccatttatctggtaaggggttaatatctgagatatagagatatacatgaagcttctacaaatcaaatgcaaaaaaaaaagaaaaaaaaaagaaatcccacaatccaattaagaaatgggcaaaagacacttctctgaagagatacaattgtccaataagcacatgaaaaggtgctgaacatcactgcgaaccaagaaaatgcagatcaaaaaacaggcagctatcaccttacatctttgaggatgactaatttttttttaaaaaaagaacaagtgttggggaggatgtggagaaattagaaccctttttcactgtccattgaacatgaaacagcacagccattgtggaaaacaatatggagtttcctcaaaaaattaaaaattgaattaccacatgattcagaaatgtcagttctcggtatatatccaacagaattcaaatcaggatcttgtagagacatgagtaccccagtgttcattgttgccttattcacaattgtcaagacatgaaagcaacctaaatatccattgacagatgaacatataaagaaaatgtgacatatacacacatacgtatatgtatgtgtgtatatatgtgtgtgtgtgtatatatacatataatacatatataattacagctttttccactttttaaaagacgcaatcctgcatatgcaacagcatggatgagcctggagggcattgcgctaactgaaataagctagtcacagaagcagggatatttttagtttctttgattttgctttatgttgtttttatttatttatacaaattcatggggtacatgaaaattttgttacgtgtctataatgcgtagtgaccaagttagcgtagttgggatgtccaccttaaacaactgatggaagagcaaaaaggagataacttgggagaaattgctgcaggcacttgcacctcactctcatgtgtagctttccttcccactcattctaagctcctttccctgcgctctgcctttcgtgaccctcatgccccataacccaatggagagacagttctgttttaaacataggagctccctctgctatatggaagtacaggcttaatgtacttttaccaaatcttacgactctataacatttatgttattagtgccagctgacggataagaaaaactagatttagagtgattatttaacttgcctcaaaatctgagcacttatctagtgccagcttactactcacccttgagtgtaagtttgtgctcactacacgttgaatacgacggtaagaaatcaaattgcttgcctatcttccatggaccacatttatgtttgtatccatggatggctaacagactaagaacagggaaaaaaattaagtccatgttctggcaatgcccttgtcctcaggtgtgaagcagaatcaatcagctagaataattaaaacaaagaaaacaggtatactagcaaagttttcgttgccatgcaatataactgaaaacctcagaatgtatctgcttttattatttttcacaggtatttttgtaatccaaatgaatttaaggactaatatttacttcattactcatgtttcaagcagaaagaccagaatggttttcattttatcttaaccctaaggctagaagagcacactaagacacacaaagcccagcggctgctcgagttaccttcctcgacttcaaagctgtctggatgaagagaaaagctcgacagaaactctcttctttgcagaaacctcttcagcaagtcaaaacaaagtgcacttaagatgaactgaatatttttcaaaatattctaaaattttccaccaagtttcttgggaacactttttcaaacaaggctttgtttatcaatgaaaatacagcctgcattttctttgaggagcttgtgtctcagaaagattgaataggtaagtctttaggaattcccagcttctcgaaatgcttactctgatttagtgaaaaacatccattgagtaggttttaattatctgtagatctaaaaagaatgtgttttactccactgttattttcccccaaaggatttcattaaagattgaaattcagctcctgcttaaacccctggaaaatttttactgtaatctacaggtacagcctgtttaaattcttagtttacttgccctttaccattttaatctttctcgtcctcaagcaactgcttgaaatacaatgaaaaatgtcaaatccaatattcattcatgagtttcaaaagtatgctgactaaaacttagaattttaaccatcacataataaactttataatgcaaaatgcatgttatatatttaagccagctacaatcaaaagaagcgtagtgggatttttttttacatgagtccaatattcttcagtcttttttgacaaaggtatacaaagttgattttccatcactacaacttatcccacgaggaaattcacttccatcccacaaatacagagctcatttaagtgttttcaaagcagcactattgtcacttaatattctacatgctaagccaatattatatgaaaagatatgttccatgcacttagtacttttgttaccttcaatgaaaattatgtcaacaaatgtgctgacttttcttatagccacaagaaaataaggtagcataagcccaattgttgacctgaatatggaagaccacaatgactttgctgtagttatttgatgacataaccacgcaaagcaggggagttgacagataatcttctctcagccaaattcagggagcttctgctgttttctgagtgtcttggggtaagatccgaaagcacctattggtcctttattgcctgagccatcctgtgccttcctgtgctctttcacaaactccagactgttgtgcctaccaccttttcatcaaaacctctcatctggaatccctttctttaaaactgagaacgttactcggcatggggttggcaatatacattgaccagagcccaggtgtgtaaaagtcaacctggcatgacttaaaatcctaacgctactacttttatcatttggaggtacattacctaggctcctcatgcctcagtttctttacccttaaaatcagatgagcccagaagtactgttgtgaagaactgcagattgtagctcaatactgcccacagaaccttcatcagaataatcatgatatgcgttccacatcctcgtcccagtacttaatgtgttcataaaggttaattaaccatccccaaaccatagagctagtaattcctgtaatagtaacctgacacatgattatttatcaaaactgcactaattattattattagagatacattatgatattgaaaagtaatgataacttaataggttacctttctccactaacattttgcatttaacaaagaggtggctaatggttaaaatatctgtttcagtccttttggtttatgattgatcctgcctgttgcaattccacagccaatgtaatttctcctttcaatcttctaataaagactgctcaagttgtttagatgagaattttaaaacattaaccattttaatattttttcagttagagtttgacaatatttagtcataagctttatcccatcaaaccattatattaatctatgttttcatttaacctacattacgtgtctatactgggcaacactctgctaaaagctaaaaacgtagagatacaaagatgacttagtcataccttttactgctgaacatctcaactcagcagtagaaattaacatttaaggccaggtgcagtggctaatacctgtaatctcagcactttaccaggctgaggcaggaggatctcttgagcccaggagttcaagagcagtctgggcaacatggcaacctcatctttatagaaaatttacacaattagctgggcacagtggtcatgcctgtggtcccaagtactcaggaggctgaggaggggggatcgcttaaatccaggatgtgggagcttcagtgacatctttgcacctctgcactccagcttggatggcagagtgagaccctgtctcaaaaaaaaaaaaaaaaaaagaaactcacatttatgtagctgtttcacacccacctagttaatggtctaaagaacagcaagaagcagtcagtgatcgctttaccttggggacaaggggctggtcagagtggtacaaagtttactttgaatgagtccttataggtaatgccaccgttgccctgtttagaggccttctgatgtagaaagaaaacacacacaaaaattttgcttacaaacatatcggacagcttgtctttccgtgctctcgtgatgaactgcctgtccttctctaaggcactaatcacaaggacttatacctgtgcacgtcctgcctaggccagggatacccaggtactgaagagctacattcttggaaactcagttctgcaaaggccctgaatcactcctgagaaatctgacagtacaagaagagtcttgtttacagcaatgggattgtgaaacagacaaagtgcttctaattttcagcctcacctcaaccctatgccacaacacccaaatgaattcaagcttggtaaagaaaggaaccatgaggtttctatttcctttctttttcctacatttctcactgccagcatctaccaagatttgacacattagagataattgatggctgtgaaaaaataacacttatctgtaaaataattgacaataactgaacttgtatgtttggaggaacacttaccgtttcagataatgacttaggatctgtctttttgctagattgtcatcatagaagaatcaagaagctactgcctgacaatggattaccaggagattgcagtttgtgtgtcaagaggagacatcataagccattacaaattagatagatgacaaacacatagatacatagaacaaactatgacttgatcgtggtagttttttattgctaagaggtcacagaaaaatccacttaatgcatgccaactaatgccaatggcaacactgtattgcaaccctgtgtcattgtatcttcgcttaattggaaccattggactttaagaaatataagcataggtcattccagagtcaagtgcagcctactgtgaggttaatgtggaatgagcagggaaagaaagagaaatcagctaagtgaagaaattctgggaaaaaagaaaatcaagatgattcctctagaatagagtctaatgaactttcagtgaacttccttatgttacccagaaattatctgctgcctgaagaaaaaggtagctaatcaacgaggcatttagaggcccttcattttaagggctgcacaaagcacttggtgaataacaggatgatctaccctttacttcaactccaaccatgcgaactcaaagtgggagggatgttttttccattttacctatgccttaggaaaaaagaaactgtaaaacttcgttaaatcatccgttattcaatggacaaagaatctagaatctgaaaaatgcaactattggcagatgtcctttcattttccacacctgacaaaaagagggagaattacaagagcatattgtaggtttgactgggaaattagtgctccactgggagtctttactttggatcacatcttcttcctagtgcttcagcaattactgcaataccttataattaacatccttattcttatgaataaaacaatgacaaaggacaaaactgccgtcatttattgaataactacaaatatccatatgcattatggagtacattctatgtgccaagcattttacactatcatcttagagttttgtcaagatgctgctcattgcatggtacatatttttttttaatatcagaagataatgtgtctccaagggtttaaggaactcttacaaaatgtcatgccaaggtttgttgactccacagccacctggtgacactctttctttcgctttggaaaggtcatggaatgatgatactctgatttttgttcatacttcaatgaaatggtcaataaatatttactagacattcacaaacacatgcctgtacctggccttggggttctagtccaattcctacaactttagggagatgactgcagcaggtccccttcagggaccagcatctcccaccccctcccctgacactcaaagacaaagcacagtgtgtgccacatccagaaggtgcaaggatgaggatgaagaggaagcagctgacacaagcagacacactcccctgaaagctgggaccttcgagatttaaaatttttgtctgggagaaaaagtgaggggaactccaaattcccactgcacacatagtcactttcaaaaggagcttcctccaagcaatgccacatgttaccttacaatcaaaccagaaccaaccaaagcttctatctacccttctcttcgggaaccttttgtgtactgttcactgaactggcatgtatctctgttttcctggtattttaattacactcacgtacatcagcaaacatgcatggaacgccctgagtgtgggagggtttgggaggtgagaggctgggatttggatgaggacattagccagtaatggaagtttgtgattctagttcttcctgagatgttcagtccttagcgcacatgaggagatggacagattcttacggagatgcaatgcctgagtggtatgctacagtggcaatgaacttgacacatgactgaaagatacagtggacattgacatctactaagagcatcaggaagactttggagaagaggcgctgtggccagggaaaaaattacaaattgttcatgtaaataagtaaggggacttctctaggcagaaggaactgtgtgagctaaaacatggaggcatgaggtatgcaaggttttacagaaatgattggttgtctgcttgtggttaaaattattactagctgacacttagggattatagtaagtgtcaaatctatctgctaaatgctttaaatatatattctcatatttctcacaaagaaaactctcaggtaaatgtaacaaagatttccatttaattgttaagaaattaaagtggagagagattactgattggatcaactcttagaaccattaaaaagtggacccagagagccgagacattcatcctcagggtcagtcatctcataccctgtgataaaagcaggtgcatgtgtgtgagggcgtatgagaactgctagataacagaaagctccgaactagctcaagcactctaagtttagtacccttgattctaaaagctcttgtctgatttcatcaaggaaattcctggcctgccctgggcaccatttctgatttaaaataaatggaccgaccttcatcacttcaatagcttacattagaacatcttatgcggaaagtatataccacttgccaattctaacttggatttaaatctgtatttgagttttcatttattcgtcattctgagagtaaaattgatatccactgtattagtccattctcacactgctataaaaaaaactatgtgagactgggtaatttataaagaaaagtggattaactgactcacaattccacaggctgttcaggagcatggctgggaggcttcaggaaacttacaaccatggcagaagggcgaatgggaagcaagcatgtcttcatgtggcagcagaagacaatggtgaaggaggaagtgctacacactttcagacaaccagctctcaagagaactcactgtcatgagaacagcaagaggaaaatctgcccccatgatccaatcacctctcactaggaccctacctcagcattggggattacaattcaacatgaaatttgggtggggacacagagccaaaccctatcacccactaacagttgctgttaagtagataagtcattataataaactgtgatattccaaatggagcacacgatttttgaaagcaaggactttctccgctgatactgtatctctgcaacagagtagacaacactacgtagagtgttgcctgcacagcaagagctggatcaatatctagtggaaggagggtgactcttcaaacctatttaaagaaactcctgatttacattgacttctattcgttatcttaggatatgatcccatggaaggatagatcagctgactaaaagggagacttccaatcaattgcaagttggctacgttggctagctctgtactctagtgaaggttgtaaataacaaaccgtacatgtcacttggattggtgttcaccacccacctccttgattccacagcggcccctgactagtcttcactatcttagcaccttgaagagtctctcacaggaccccatttttataaaaatagacccgggatgcaatatcgtacgtggccagtaggtgccaccattagcaatgtaattttactattggactcctagagatattcaaatgaattccttttgtttcttgttacataattgaaagtttttaaacacctaattcatacagataaaacaaggatgtgttatgtcaggtttaaatctgtaattttagaagacaatacatatttgaacgtggtaaggagagggaagaaaaatatgtttagaaggtaggacatcaagtatctaccgaaaatcatttatgtgctacacgttacatactgggaacagaaaaacaggtaagatttacttgatggcaagaacgcatcatctgtaggaagatatacgttaggagagatataagcaatatagctctaagtcctaacaatattatgaaaaaaaagcaaagaggattgagtgggcacatgcccatgtattcacgcaacttttaggcaggcagtgaagttcgagctgagttgtaagggatcaacacatgaagataagggtgagctttctgaaaacaaccaatagaagggaagaacgaagtaatacgagttcaaaaagaatgagaacaacgtggtccaggataaagaatggcagaggaagtagctagctagtgaaaaagaagaatgaattaaaaggaaaaaaaaaggccaggtgcggtggctcactcctgtaatcccagcactttgggaggccgaggcgggcggatcacgacatcaggagatcgagaccatcctggctaacacggtgaaaccccgtctctactaaaaacacaaaaaaattagccgggcgtggtggtgggcgcctgtaatcccagctacttgggaggctgaggcaggagaaaggcggaaacccgggaggcggagcttgcagtgatctgagatggcgccactgcactccagcctgggcgacagggccagactccatctcaaaaaaaaaaaaaaaaaaaaaaaagaaagaaagaaagaaagaaagaaagaaagaaaaaaaaatcacagtattgggggaacaaatgatgacatttctcacataacaaacaaaagcgtttcttcactgccctatagatattagaaacctgggaatcatttattattaaggcggcaactctagacccagtgagcaagatggacccgagaaggttggaaatgaagcgaaggacaatcaagaggtatttatttattagcgtcagagaggagataaatgattgaattgcaacagtggcagtggggatactaaggagaggttacaatacaaacatcgtcggagattacgtttgaaaagagtggagacaggttgaccatgagggtcaatgcaaagaggtaatattccagaaagattctgaggttagtaatttgggaagctgagcatatgatttcaccattagcaaacattaagagacaagaggtagaactagttattttggaactaaagggagagacagtggattcttatgttgaatttgagatgcctgtgaaacaatgaggtacgcaaatccagtggacagtcagcaacctgagggtggttaagttagcacacagagattttggaattatcctaacacaaattttatctacattttgcatatgcataacctgaattgctcaggtgatgaaatgaaagacatcggtgagtttgcatgtaacatttttcttttatttgccacaatgattgtggtcagtatattttagttcaacatttacccaatctctctcaggtggtagacaccatgctaggtactgcagctgcaaaagtgagtaattctcaacagtgttatatctcatcaagtatccagacatggaattacttgtacatcaagccaactactatggtcactaagtgttggttgatttaaatgctgcctctttttctctttttggaaatgtaagtacagattataagtacaaaggagggaaatttaatttatattttgagaattaattaggtaccttctaaatgtaaaatatcctaccagattctaactaggatgtgaaaaataaatagagatggtttctgccttcaaacgagttcacagtttagaatattggacatacacaagtaatgcaagaaaagatcaactgtcagagcttcagctttccaatttgaaatataggttttataaggctactttaaaactggggttatttaaatcgttaattgtgaattgattcaggcattcatctaccttgaggtattagataggttaattaactaccatgactcatttttcaaattataacgtgaagactaattttcactaccttcttcccctaagatgttaattaacacactttagcagtgcaccatttccatgtcttatgaagacttctatgtggagccatgccacatcttgctgactgacactgacgcctcagctgggattgttatcaccagccagggggaagagatttgtccaaattctccttaagtgctgttccataggactggcgctcttgaatacggcagacagctaacatgaatcatgcatatgctaattgtaataaataatgaaaatatttagacacagagaggtttgaacttgaactttatgaataagttttgattagtatgcagtacaagctgtatactctgcttttgttcttactcttaaaaggcagtcagtacttaatgatgctttgaaattttagttttttattcatctcgtcgcttccacctttctatcatggagcaaagaagtcacaaggtctaaacccccagatatcaaagtacatgtctccacaggagtcttgactcctgtgtggacacactgatgtaatcgggccctgtgttagtttcagccaagaaaaaaaaaagtagacgctgtctccaaagaaatgagcccaaagcttagagccacctctcactctgtctgaggctatggttgctgctgtgtagagttctaatgggaaacctccatggctgttgaaaggaaactctgtagaacagatggcctttttttgttgttaagagaccacccagaagacagggctctggccttgatgttgttgttgttgttaagagaccacccataagacagggctctgggacagaaagaagtggtaattaatgagggcttcactaagtaatctgatttctaatagatccaaataatgttatgtctaaattgaaaagacactaacacatgcgggtgaggatggggagaaaaggaaaccattacatactattgggaagaatgtaaagctatcatatcatctagttgggcatataccccccaaaaaaggaaatctacacatcaagagataatctgcacttctaggtttgctgctgcactgtttacaatagcagagatttggaagcaacctaagtgtccatcaacagatgataaagaaaatgtggtacatagacaccatggagtactattcaaccataaaaagaatgagattctatcatttgcaacaacatggatgcaactggagatcattgtgttaactaaaataagccaggcacagaaaggcaaacacaaaagtatagctttttgcagctttggttcttatctgtggaatctaaaaatcaaaacaattaagctcatgaacatagagaatacaaggatggttaccagaggctgggaaggacagtagggagttgctggggaggtagggatagttaacaggtacaaaaaaaagttagaataaataaaatctactatttgatatcacaatacggtgactatagtcagtaataaccgtacatttaaaaataacaaagagtataactacattgtttgtaactcaaaggataaatgccggctgggatggatatatcgttccccatgatgcacttatttgatatagcatgcctatatcaaaacatttcatgtaccccataaatatatacacctaacgtgaaccccaaaattaaaaaaaaataaaaataaactaaaagacagatatagacacaatctagcaatgctcactgaggcattgcctgtgaagccagcagggggcagcagctccattctctctgttctatgggcccaggagctaactgcaggcaaggcagtgtgaatgggtgaccaggaagggacatagtggatttgccggtaataaaaattagtgagaataaagaaaaacagtaaaacttttttttaaagcaagggggaaatatagctttctgctacttgtggaagttagcttgtgtgcagtgttctccccgctcttcaatcctttgagatctccttagggtttcgttctgggttttattcacttattgactgagcaagtagtgtcaaagtgtcaggagacgtcagtcactgtgctaacgtaagcgttcatggaaataaaattaacagggtagctttgcctcaaagactatgcaatcaattattgaagatagaaaaataaatagaagattgcaacctgatatttgttctatggtaattaagcatagctcaaaccagagggaagggaaacaagaaactgccctgatgaagatgcttcaaacaaatgtgattctgtctcataactttcccttgatggggcaaagcatttactccgcttttacctgcttacacctgggtgggggtgcatgttgaggatatattcataaacaatcagtttgtgctttggcagatggaaacatgctattgcaaaacaatagctctattgcagacgcggaggtgggatgagaagcatttataagagacctttatttgcagaggacacttgcccaagcctcccttgtttcatgccatcggctcaaatgaagactaacaaggaagcagacctcccacccagagtttggtcggaaccgacagacactggctcccaaaccaagtgcttccatgtgaatgtgacacttcttgtttctcttgctctatctccagtagcaatcttttgttctactgcccagaacttaagctctaaaggttacataaacttattttatgaaagacaaatttgacaaattcagcaattcataatttttttaaacaattacttctacctattttgcctccttaacattcagacttgtggttttgccagtataactttttggaattggttttttgcctgtctgctttgtatttctgacctggtattttactcctctgagtcagtttcccacctcaaactccacgacttcttcaaaagctgtgtgtcgtaactaaaaccatccttctttcccttcatcaggttccaagaaggaagctctgtcatgagtcactctgaatatgcaaacttccttttaataaaaccacctaacttcagtctcccaattatctagtcattcattcattcatctatttgtttatagcagacagaagggacaagaaataagatagcatatgcaatgaatgcatacaaccaagcaaatatatttcataattatgtcaaagtatcacatcacagttagctcaacactttacacattctactttgtatttctagttctgaaaaaaagttgctagacatttagaatgacatttgcactgaaaaatcctaactcagctaacaactgtgattttttctggggctctgggagcaatttctttttccacaagaatggaccactaaaatgaacaacgatcggcccaagagatgaaataacatagttattttctgtttaatacttcacttaagaagaacttgttcctcacacatggttgggcatgaaactaagacatcagatttcagaattctcacttctcatgaactcaaagataagtacaattttggtaataactatacaaagtttaatagcctcgaattttaaaaaccttccacagaaaagcataaacaacagatttagaccttttgaattaaatatcgttaaaaatcatcttagtaaagttgatgtttgcatgctagaatgtatatctttcaattcttagtactagctattctgaggaacaactaacctcctgcgcgtctcctcaatacaactctacaacacagacccggagaccaaaagtcttcagtgtttgcaagtgtaaaataggaatgtggaacttacaggtgctttttgtcctgcatgcacaaaagcctggtttggggttcacagctatggctttcctcggtggaccgcatccataggcttgggaagagcctacctgtccactcacttagactccacggaggcacttgccagctgtggactctttaaggctgttatgcacatcacctgcacctgcgtcgtggcccctccactcatccctgatcatggtctatgagtctttcctctgccaccatcacatcgccagctgatagccctttcaggtaaagtattcctgctttaagatgttttgctactgttactcttccaccttctattcagcacagctgttaactgttatctgtaatgcaatgatgataactgtatgaaactagccgattacttgctactaatgttgaacatatgtcgaaaacattttaaccacttatatgttgaagactatagtcagttctgaaaacatacgatataacacgttaggtcttttgttttattcgatgaagtaaattaagttatggtggtgagacttgctgaaggagcagctttcaaaataaacttcccagagaaagaaaatatgaagaaataaaacaaatgtaagaaaatatagcttaacacagcagaattacattaccgaatgagcattgctatactttctgagtgacgtgtcccaaaaaaggtgcctgttattactcagtgcctgcaagagacaacttttttatcttctgaagaccactggcttttcagtttctctttgcccactaatagacaaaactattaaaatgtccatgtcgttatgcacagggcttttataccaggtaggattaagtatagaatcatgagtaatcattaccactattaataaaaatacattcttgttattaagtgcctaatatttgcgtgtctcaatcaacaccactactgtaaagtgaatacaaatatccctaatctatacttttaaaaaacaagtgcactgggctagtccgataaggagcatgtcctcttaactgagcgtttgccgtcagccccctggctccaccctgtcagcaccaacgttcttcctgtattctttcctgccttgagaagagcacctgctctaaaggatctttgtcgactgcagaaacaattggtattacaatctttattactgaatgcatatataaataatggtcagagcttctcctctccttgcaaaagcaaatattatacattatgttgatatatctagataaaagggaaacaagtgcaatggcatgtttcacttcaccaatgcagcctttggttattgattagccttaagatttttaaacatattgaaaacaatcatagacttatgctggttttggaactactttattctacagtttggaaccactgagcttcttgaaggcagggaccacaccttttctgccctttttattctaaaaatataacaaatccctaccacatgttatgtgttcagtgttaaacgaataaactagcaaaggaaataccactggacaagtcactaagttttcttaagtaaaataaaaagtaatgtgtcatacataaaacaaaggtcaaatacaaaccatgaaaccattacgctgaaatataaataggagatttaagaaaataatcatatagaagttcagaacaggtcaggcgcggtggctcacgcctgtaatcccagccgtttgggaggctgaggcaggcggatcatctgaggtcaggagttggagacaagcctgaccaacatggtgaaaccctgtctctactaaaaatacaaaaattagctgggcgtggtggcacatgcctgtaatcctagctactcgggaggctgaggcaggagaatcgcttgaacctgggaggtggaggttacagtgagccgagatcgcaccgttgcactctagccggggcaacaagagcaaaactccgtctcaaaaaaaaaaaaaaaaaaaaaaaaaaagttcagaacaatggatataactgtcctgaatgcatttttgtcctgcctctaattgatagggaaaccctagaaaaaagcaatttttcaagggagctgagagagatgcttttcaatcaacatgtaaatttcctggacgtcacctatgtgtaccattctgtatgagagatgtaaaaaggtgcaaggcaccagccaaaccgccttagaacttgcagtattattgaaaacataagccagacacacatgaaaagaattgtagctgtaaacaggtgaattgagtgtgggaattaagggaaccagggaagtcaaagcttattttcatataaatatgaatcttccagatgcattgaattttggccttccattggaaaaattatttaccagaattctacaatggacttttaatatctgactttggcttaaattaaaacttcttcttaatttttattccccttttgcaatctttaaaacttcaaatgcaagcccaattatagttattatgctctaaactgcattttggtaatctttcatgagttgtcagatgcaatggatagtttcaggaaatgacttactaaaaaatgtagcaagtgttcacttacagcgagcactaagggtcacaacgtaggagccatattgagcatagggcacatgtatccctgctgcagggaacccgggtgcctatgtgcaaaaccacactcagtagtgttcttctctgttggacagtagcctctagaactcaggaattttaataaaaacaattattatgagctagatgctactagaacaaaagagtttttgaatgttatttattatgctagcattgaaaagcagaaattaatagtcacattacacattaatggtaacaatttcaaaacagtgagtcactttctcaaagtagcgtagctgttaaatcttttttcaacgcttaaaggcttatcaatagaacaatggaaacgtagaattggaataaatcttaaaggttatataatcctggatgaccagtgtatgtgaaaatcagcagattctcatttcctttgtgttcagagcttgttgaatagtcatctaacatgctactccaggactctaacatcaactgagtgaagtcaaaataagagatgctaatttactctcttaaagctaaatataaccagactcatttgttaggatgtgcgaattgagagtcgaggaaatgaacaaacatgcccaagggtacactaccagtcttcttcctgggcaggaacattccaaaccactacattgattatagatggaacagggcgctttcctgcatcttgtgattctaggggaatacgatgtctccctaaccaaaaacatcccatctatggcccagtacttgtaccagtatttctaccaccagagattcactcctgaggctcaaaacttagtatcttattaaaatatataccttagggatgattacgaccttaagaacccttcattgttttcatgactttccttacagtacatttggagagattacaacaacaacaacaacaacaaaaccgagagagaaattgtgtgtataaaggaaagtagcaaagactaatcgatctaactcccctatttctgcacctccaagtcttcaccatcataaaggcccaatctaaaggtactgtccaattccaggagacatttccattgtccaagccaggagttctgttttctatggacctagggaactctgcctgaatcttattaaatgaatttcactgtaattattttggtatgtgttttatctactcttccagaatatattattctgttttacacaatgcctatcacagtgcagtgaggttgtacataagaggtctctggaacgtatccgttgaatgaacaaactgatacaacgtaaaatagaatcagtggaagcacaggagagctgaaccctgaatttggagtcaaccgcaatttaacaaagccttacctaacacacccagtgagctcttttctgggtgcacaggagttagttcagaagctaagatagagaaagctgtaacggaaagtgtgtttctcatgaatcagcaggaaaaatgagattgtgagacatttgagaaggatgctctcagcctgtagactacggtcactgcatgcatgttaaatgcctcagctttctatctttaggggaaaaataatgcatgaagtgtttgtctaagagctgacactggttttgatttacaaatcatattttttcaaccaaatatgagtcaagttctactacacgtagcactggaaaaaaaagtgttagttgtaggcacctggtaatttcaagtagtaaggttacattttccagctaaaactagcatttggggactcggtgtttttgtttacctaaatgtcctccagcatcagtagatagtgccgttattgatacattttgttttttttgcagaaaagatcactgggaaaaactcatgcccttcccataggaaattaacagatctgaatatggatgctacagctttcacccactccttttattttcgatttttctttactcagcataatgccatctttttgctcataacagcctcaatcagcactcttggccgcgtcaaggtcaggactgcctgctgcgactggctcgagattcaataaccagccatgaggggtgcacaacattaaatggacacagattgctttttctgtaactccatttaataagcgtcttttctaaacaatccatgcaaaaaatataattttttaggatcaaaaagaaatagaatttactcattattatcttagactctaaacaactaattgtagtgataattatgattatttcaaaaccatctcagtgataagcttaattaattctccaggcaaattcactaactgacaaaagttttctcattcacgggacaatccaaaccagccttaaaaatttaaaaagctaagagatatgccagtactacatctgcttaacagtacccccacagtatacaagagtatggttttacttaacttcgtgtttcccaaatagacaccagtcaatttggcagctcatgaagcttaataatcagacctatagcattttaaaaatcattttcacataatacttagcattttacatgcatatttacaaattaagttctactaaataatgtaaaaactatctatctaattttctttattacatatctgtgtttttattctcccctaagcagttttattagtatataaaaattatcactaacaataatcacctcttatgagaagtagagtataacacattattacacaaatatttttaactacatattttggttattgtactgttcagtattatatttgataaagacacaagaaagccatcaacatttttcgatttagaaaacgaacactgttaatgtgctggttgttttcttgatgtagacactagctagccaggggatacatatccacaccaacacacaccatacatgggatgatcctgtttacaagtgatatccattgctctcattgagaacttgaatcaaccaataatcaaccaaaaatcttcaagtgcaatcagcaaaacatctgaacgacaattcaccaattttgaagtcacgttctcctcaactacgtattttggccactgttgaactttggcctacgtggtttcttagaatttctatagtcaaccaatatttattgggttcctaccatgtgccaggctctcttttaggagctttgcattcagtgttgaagaagcacagacgggaaagaaagatgtgtaatattttgacaaggtctaggagacaatggtgtgctgtttgccgaaagcacagagagggagcactggccggtgctcagggagctgctcaagaatcacgtgagtagtatcacaagggcggattttactaaagacaattgatattcacatcagaaatttacatacgatttgtagctgaatttttcccactacctaatgaggattttgtcagtcaccgtggctaactaaaatgacaaggttacgctagcctatgaactttgcctattttgcatacacttacaaaagaatagagaatcggctataaatttgctgagtcagaacattatactggccatccactttctcacttctttgtttttccagaatgagcacttttgccaatcccggtttgttgtgctacgtcccaaatcaaacagttgcaggagttagaacttccacgtggccattgagtacctcatctctttctcctgtcctgcatactattgtgtatgaaaactagcacatgcaccaaagtaccaacacatgtccaggatcttttttttctttttgacctgtacaaaaaatatagctcttactttcaaatttggaaatgtgtgaagtaagatctttaacttgttatttccatgtataccttactatctaacagcctgtaaggagatgtgtgcatatgggtttatagatgggtttccttgcttggagggctgacatggtggttttcctaaagccatcactaactcagccagtgccccagccaggcttgtccttgaggttttggcagcacggctctctgtcttggttgactgagcctgtgaccagcctcctgacagcaactcccacaaccgacattgctgttttggtccagccacaggctcctgtaagattctgctttaaactcatggtacttttctaccccctgtaggaggctcagccttggtgactactccagcaattcctagaaattgtaatagctaaggatgacaacatggacttgtagactaacactttaaatttctcctttcttgaacttggtcccattttagattaaaatcttgttctgattcttaatcttgcttcccaggtcaagggtatcttatcttttaactaagttagaaagtaaattagacagcaaatgtgtttgcaaaactatatctggcatatatatgcgtatatttatatatcaactatatctgtaaatattcttgaaatagaataatagtgaaacttactggaaactaaaaaccatgtgcttctaaaacaggctattcattgggagaaaaagattatgtagtgatttttttttcaagatcccttacatcatttcgttaatgatttgtcagtagaagaaacaacttgtgtttttaaaaagcattcttgttctgataattggcgaactttgtcaaaatagggcaccacgctctgctcgtgtatcaagctttgatgtgaaaagagaacttacagatacttctttgtttctgaatgccactctctcgtaagtcactctctttttgcatgcaaatctaaggtctctcactatatgaaattaattaatgcttaaagtaataatgcgtttgatgatgcattatatctttagcactttagaatctcaaagaagattttaagagaattggcataaataatttcagacaacagatcttgcacatttgaatcctaaacaatgacactaacatcacattttcagataccaaataaaaataaatctttttcaataaattttaaaatttcaaacacttttggatttacagaaaaattgtgtagattgtacagagaatttccatacacctaatacccgactaccccactattaacatgttaaattagtgtcatacacttgtcatggttagtgggccgatactggaatattttattaaagagtccatactctattcagattcttttcagttttgcctaatatcgtttatctcttccaggaccccaccgaggaccctgtataacatttagacatggtttctccttaagctcttcaatgactatgatagtttcctgacttttcttgttcttcacgcctaccttgacagttttcaggaccgttggtcaggtcttctatagaattcctctctatcgggatttttttttttttttttgacggcttgagatataagttctatacaatatacctatttaaagtataaatttcagtgtttcattatattcccagatatatgcaaccatcaccatagtcaattttaaatattttcatcactgcaaaatgaaaccctgtaccctttagcaagcaccaccccccatcccttcaaggcaaacacacaccaccctctccttccagggcccgaacaacaactcgtcttcttttgtctctgtagatttccctgttggggacatttcctatgaatggagtcatagacatgctgtatggttttgcaactgtgttattttttttggatattgtcaaggttcatccatgctgcagcatgtattagtacttcattcttggtctggctgaataatatttcattgtatggaaatggcacagtttgtctatcctttcatctagtgatagactattggggtgtttccactttttcctagtttgaataatgttgacataaacattgttgtaccagtttttgtgtgaatacagtcatgtgctggataaccaccttttggtcaaggatgggccacctatacaatggtggtcacgtaagattatagtggagctgaaaaattcctatgagctagtaatggcctatggtcttccaacattgtaacgcagtgcattactcatgggtttgttgtgatgttggtgcaaacaaatctatcgtgctgccagtcattaaaagtctagcacataaaatgatgtatagtacataatgcttttttttttttttgagacggagtctcactctgtcacccaggcctgcggtgctgtggcaccgtgtcggctcactacaacctccgtcttcttggttcaagcaattatcctggctctgcctctcgagtagctgggattacaggcacccaccaccacacccagctaatttttgtatatttttatagtagggactgggtttcaccatgctggccaggctagtctcagactgctgacctcaggtgattcggccgtctcagccttccaaagtgctgggattacaggcgtgagccaacgcgcccaacccagtacataatacttaataataataaacaactatgtttctggtttatagttttactatattgtactttttattgttgctttagaaggtacttgttctacttataaaagtattaactgtaaaacagcctcaggcaggtccttcaggaagtattggagaataaagcgttgtcatcctaggagatgacagctctacacctgttatagtccctgaagaccttctagtgggacaaaatttggtggtagaagacagtgatatgtatgattctgaccttgtgtaagtctaggctaatgtgcgtttgtgtcttagcttttaacaaaaacgttttcaaaaagtaaaataaaacaaaatttcaagctagaaaaaagcttgtagaataaagctataaagaaagaaaatattattgtacacctgtgcatgtgtttcatattttaatgtgttattacaaaagagtcacatgtttaaaaaattaaaagtttataaagaaaaaagtaataaggtgaagttaatttaataaactgaagttaatttttttctttattcaatagaataaagaaaaaaatactttttgtaagtttgctataccctcagtgtacaacggttgtaaagtccacaatagtgaacagtaatctcctagatctcacgttcaattataactcactcaccgactcctacagagctacttccaggttgcaaactccatttatgacaagtactctatacaggtgtagcatttttcatcttttataccataattttagtgaccttttctatttttaaaaatgctctaatacacaaatacttgatattgtattatagttgtccatattatttagtgcagtaacatgctgtacagatttgaagcttaggggcaacaggctataccatacatcctaggtctctaggaagctaaaccatcttggttttagtaagtgcactcaatgatgttcatacattgatgaaattgcctaacaaagcatttctcagaatatttcctcattgttatgtaacatgtaactgtatatgttttcattgctcatgggtatattagaaatggcatttctcgattatattatgatgctatgtttaaacatttcaggaattaccagactctttgctaatgtggctgaacttttttccattcccaccagcagcagacatgcgggttctaatttctccacatctgtgttacgtacgtactatacttggctttttttattcttgccatcctggtgggtgtgaagtaggatctcatggtggttttggattgcattcccctgatgcctaataacgtcaaaaatctctttatgtgaatattggtatttgtaaaatgtatatgaagatcattaacctattttttaactgggttatctgtcattttattactgagctccaagagtactttctatgttctagatgcaaatcctttatcagatacacaatccccaaacattttctcccattctacggcttgtgtttttactgtcttaatggtctctttgaagaataaatgtttttattttgatgaaatccaatttatctttttttttttttttttttttttgctcttgcctttagtaaaaaacatctttactcttttttcattgattgctcaggaagcttcctctcccttcagtcacatgacaattgcaaacattggttattttccaaaatcttccatttccctcctttgcaccactcctcccccagcactctctcccaggacttcagcgaagtagaaatccttcatcctctcttcctcatcacttagtctctttcttttctctctatgactcttccatcagaacaaagtccttgctccttacccccttagctttgtctctctctctctctggatgaagtgcagagtgtcgtgaagcagttgtgtgcactcattgttccagtacctcaattttctttcaaccccaaacctagtggcttgcctattattttacccaaactgccctcaaaaattcaaccagtggcatccttttgctgaattcaataaagtatgtttagtcctcatgtcacatgaacctttatgcattgaagattgtttcccttgcccccccactttttgtggttatttttttatccttgttaatttcctttttttaatatatacactttgagttttagggtacatgtgcacaaagtgcaggttagttacatatgtatacatgtgccatgttggtgtgctgcacccattaacacatcatttagcatgaggtatatctcctaatgttatccctcccccctccccacaccccacaacagtccccggagtgtgatattccccttcctgtgtccatgtgttattattcaattcccacctatgagtgaaaatatgcagtgtttggatttttgtccttggcaatagtttgctgagaatgatggtttccagcttcatccatgtccctacaaaggacatgaactcatcattttttatgactgcatagtattctatggtgtatacatgccaacttttctcgccccctttttaagctccttctttcactggctttcatgatcccaccaattcctgcttttccttttttgtttttttcctggctgcatcttcttcgtcaatttcttaaattcttcccttgtcaacctctattttttttcttttttgatatttgagtatttcatccatggcgcttctcactcccctatacattctccagggttgaggtagtctacccccataggttcagaacctatgacctgtatcttcagttggcattcaatagcctatccaactccatgtgggagtttcataataatctatgggattacctgacttctcaatgtctcctgctctccctctcctcactaagagtcccattgtgtggcatcggcaatcacccatatgactaacaagaaccttaagacttcttcttcttcaaagacaggtctattgagatgaacgtacttttaagtcaccctcccctttaacttgtgtgattaaatgtttcccaagataattacagagtgaagccaccatcactaaaattagatttcagaatatttctcacaccccatagagaaaatttatactcatttgctatcactcttcattctccctctgccttgtacacaggctgagtaaaccactagtctaagttttttccctatagatttaatctctctctggacgcttgatctgtcactaaggtctaacctgtaatacctcctcagcagggcttaatgtgtatacttccttacatcagattccctctctctttatatcttttacttgtgaaactgctattttctcccaactgggaacaccatatatgtttgtttactctaatctatttttgccagcattgttctataacagtaaacatacttatatggtttggatatttgttgcctccaaatctcaggttgaaatgtaatccctagttttggaggtggggccttgtgggaggtgctggggttgtgggagctgatccctcatagatggcttcctgctatccttgcaacagtgagagagttcttgcaacatctggttgtttaaaagtatgtggctcctctcctctctctctcgttctcactcttgctatgtgatgcactgtctgcccctttcacttccaacatgattgaatgcttgatgaggcctcaccagttgaggcctcatctacaggtcagccaattaaacctctttcatttataagttacctagccttgggtatttctacatggaaattcaaaaacagcctaatacagaaaaatggtaccaggagtgggatgttgctataaagatacttgaaaatatggaagtggctttggaactaggtaatgggtagagattggaagagtttggaggactcaaaagacgacaggaagatgagggaaagtttggagatccttagaaactggttaagtggttataaccaaaatgctgatagaaatgtggacagtgatgggcaggctgatgaggtcttagatgaaaatgaggaacttactgggaactggagtgaaggtcacctatgttaggccctagcaaagaacttggttgcattgttttcaggccctaggaatctgtggaaggttgagcttaagaatgatgagagggtacatggcagaaggaatttctaagcagcaatgcattcatgatgtggcctggctgcttataacagtctacactcagatgcaggcacattaaatgacttaaagttggtacttatatttaaaagggaagcagagcataaacatttggaaaatttgcagcctacccatgtggtagaaaagaaaagcatgtttttagtggaagaatccaagtgggctatggagcaaacactttctagagagatttgcatgactaaaagggacccaggtgctgctagccaagacaatgggataaagccctggaatgcatttcagagatctatgaggcagcccttcccatgacaggcccagaggtctacaaagaaagaacaattttatgggtgagactcagggctctgaagccaggaatgcaaggtggctgttccctgcatccccactgctccagctctatccatggctcaaagtgccacaggtacagctcatattgctgcttcagagggtgcaatccataagcttggcagcttcaacacagtgtgatattaagcctgctagtgcacagaatgcaagaataaaggaggcttggcagcttccacatagatttcagaagatgtatcagaaagcctgagtgctcaggcagaaggctgccacaaaggtagagtcccacacagatatttgaatagggcagtgccaaagggaaatgtggcattggaaccccatggaatgtccccactggaacactacccagtggagctgtgggaagaagaccactgccttccaaactgaggaatggtagatctaacagcatcatgcaatctcgtcatggaaaagtcataggcactcaactccagcacatgaaagcagccacactgcaccccacaaagccacagtggacctgaccaaagccttgggagcccactccttgcagtagtgtgacctggatgcaggacatacagtcaaaggagataattttggggatttaagatttaatgacagctctgctgggtttcagaattatgtggggcttattacccctttcttttggccattttttttcctttggtatgagaatatttacctaattcctggaacacaattgtatcttggaagtatgcaacttggtttttattttacagtctcacagggggaacgaactcatctccagaagagacattggacatgagacatagaacttttgagttaatgcagaagtgagttaagattttgggggctattggcaggagatgattctattttgcaatgtgagaagggcatgagatttggggatgcaggagtggaaagatatgatttgggtatttgctctctataagtcttatgttgaaatataatccccagtgttggagacagggcttggtaggaggtgttgggttgccgaggcagatccctcataaatggcttcctgctgtcctcatagtagtgattgaattctcaaaggatttggttgtttagaagcgtgtgccactccggatcgagccaagatggccgaataggaacagctccggtctacagctcccactgtgagcgacgcagaagacgggtgatttctgtatttccatctgaggtaccgggttcatctcactagggagtgccagacagtgggtgcaggtcagtgggtgcgcgcaccgtgcgtgagctgaagcagggcgaggcattgcctcacttgggaagcggaaggggtcagggagttccctttctgagtcaaagaaaggggtgacggacagcacctggaaaatcgggtcactcccacccgaatactgcccttttccgacgggcttaaaaaacggtgcaccacgagattctatcccacacctggctcggagggtcctacacccacagagtctcgctgattgctagcacagcagtctgagatcaaactgcaaggcagcagcgaggctgggggaggggcgcccgccattgcccaggcttgcttaggtaaacaaagcagccaggaagctcgaactgggtggagcccagcacagctcaaggaggtctgcctgcctctgtaggctccacctctgggggcagggcacagacaaacaaaaagacatcagtaacctctgcagacttaaatgtccctgtctgacaggtttgaagagagcagtggttctcccagcaagcagctggagatctgagaacgggcagactgcctcctcaagtgggtccctgacccctgacccccgagcagcctaactgggaggcaccccccagcaggggcacactgacacctcacacggcagggtactccaacagacctgcagctgacggtcctctttgttagaagaaaaactaacaaacagaaaggatatccacatcaaaaacccatctgtacataaccatcatcaaagaccaaaagtagataaaaccacaaagatggggaaaaaacagaacagaaaaactggaaactccaaaaagcagagcgcctctcctcctccaaaggaacgcagttcctcaccagcaacggaacaaagctggatggagaatgactttgacgagctgagagaagaaggcttcagacgatcaaattactctcagctacgggaggacattcaaacgaaaggcaaagaagttgaaaactttgaaaaaaatttagaagaatgtataactagaataaccaataccaagaactgcttaaaggagctgatggagctgaaaaccaaggcgcgagaactacgtgaagaatgcagaagcctctggagccaatgcaatcaactggaagatagggtatcagcgatggaagatgaaatgaatgaaatgaagcgagaagggaagtctagagaaaaaagaataaaaagaaatgagcaaagcctccaagaaataagggactatgtgaaaagaccaaatctacgtctgattggtgtacctgaaagtgatggggagaatggaaccaagttggaaaacactctgcaggatattatccaggagaacttccccaatctagcaaggcaggccaacgttcagattcaggaaatacagagaacgccacaaagatactcctcgagaagagcaactccaagacacataattgtcagattcaccaaagttgaaatgaaggaaaaaatgttaagggcagccagagagaaaggtcgggttaccctcaaaaggaagcccatcagagtaacagcggatctctcgacagaaaccctgcaagccagaagagagtgggggccaatattcaacattcttaaagacaagaattttcaacccagaatttcatatccagccaaactaagcttcataagtgaaggagaaataaaatcctttgcagacaagcaaatgctgagagatttttgtcaccaccaggcctgccttacaagagctcctgaaggaagcactaaacatggaaatgaacaaacggtaccagctgctgcaaaatcatgccaaaatgtaaagaccatcgagactaggaagaaactgcatcaactaacgagcaaaataaccagctaacatcataatgacaggatcaaattcacacataacaatattaactttaaatgtcaatggactaaatgctccaattaaaagacacagactggcaaattggataaatagtcaacacccatcagtgtgctgtattcaggaaacccatctcacgtgcagagacacacataggctcaaaataaaaggatggaggaagatctaccaagccaatggaaaacaaaaaaaggcaggggttgcaatcctagtctctgataaaacagactttaaaccaacaaagatcaaaagagacaaagaaggccattacataatgctaaagggatcaattcaacaagaagagctaactatcctaaatatatatgcacccaatacaggagcaccaagattcataaagcaagtcctgagtgacctacaaagagacttagactcccacacattaataatgggagactttaacaccccactgtcaacattacacagatcaacgagacagaaagtcaacaaggatacccaggaattgaactcagctctgaaccaagtggacctaatagaaatctacagaactctccaccccaaatcaacagaatatacatttttttcagcaccacaccacacctattccaaaattgaccacatactgggaagtaaagctctcctcagcaaatgtaaaagaacagaaattataacaaactatctctcagaccacagtgcaatcaaactagaattcaggattaagaatctcactcacaaccgctcaactacatggaaactgaacaacctgctcatgaatgactactgggtacataacgaaatgaaggcagaaataaagatgttctttgaaaccaacgagaacaaagacacaacataccagaatctctgggacgcattcaaagcagtgtgtagaggaaaatttatagcactaaatgcccacaagagaaagcaggaaagatccaaaattgacaccctaacatcacaattaaaagaattagaaaagcaagagcaaacacattcaaaagctagcagaaggcaagaaataactaaaatcagaacagaactgaaggaaatagagatacaaaaaacccttcaaaaaattaatgaatccaggagctcgttttttgaaaggatcaacaaaattgatagaccgctagcaagactaatgaaaaaaagagagaagaatcaaatagacgcagtaataaatgataaaggggatatcaccaccgatcccacagaaatacaaactaccaacagggaatactacaaacacctctacgcaaataaactagaaaatctagaagaaatggataaattcctggacacatacactctcccaagactaaaccaggaagaagttgaatctctgaatagaccaataacaggatctgaaattgtggcaataatcaatagcttaccaaccaaaaagagtccaggaccagatggattcacagccgaattccaccagaggtacaaggaggaactggtaccattccttctgaaactattccaatcaatagaaaaagagggaatcctccctaactcattttatgaggccagcatcattctgataccaaagccaggcagagacacaaccaaaaaagagaattttagaccaatatctttgatgaacattgacgcaaaaatcctcagtaacatactggcaaaacgaatgcagcagcacatcaaaaagcttatccaccatgatcaagtgggctgcatccctgggatgcaaggctggttcaatatacgcaaatcaataaatgtaatccagcatataaacagagccaaagacaaaaaccacatgattatctcaatagatgcagaaaaagcctttgacaaaattcaacaaaccttcatgctaaaaactctcaataaattaggtattgatgggacgtatttcaaaataataaaagctatctatgacaaacccacagccaatatcatactgaatgggcaaaaactggaagcattccctttgaaaacgggcacaagacagggatgccctctctcaccactcctattcaacgtagtgttggaagttctggccagggcaattaggcaggaaaaggaaataaagggtattcaattaggaaaagaggaagtcaaattgtccctgtttgcagacgacatgattgtatatccagaaaaccccaatgtctcagcccaaaatctccttaagctgataaacaacttcggcaaagtctcaggatgcaaaatcaatgttcaaaaatcacaagcattcttatacaccaacaacagacaaacagagagccaaatcacgagtgaactcccattcacaattgcttcaaagagaataaaatacctaggaatccaacttacaagggatgtgaaggacctcttcaaggagaactacaaaccactgctcaaggaaataaaagaggatacaaacaaatggaagaacattccacgctcatgggtaggaagaatcaatatcgtgaaaatggccatactgcccaaggtaatttacagattcaatgccatccccatcaagctaccaatgactttcttcacagaattggaaaaaactactttaaaggtcatatggaaccaaaaaagagcccgcatcgccaaggcaatcctaagccaaaagaacaaagctggaggcatcacgctacctgacttcaaactatactacaaggctacagtaaccaaaacagcatggtactggtaccaaaacagagatatagatcaatggaacagaacagagccctcagaaataatgtcacatatctgcaactatctgatctttgacaaacctgagaaaaacaagcaatggggaaaggattccctatttaataaatggtgctgggaaaactggctagccatatgtagaaagctgaaactggatcccttccttacaccttatacaaaaatcaattcaagatggattaaagacttaaacgttagacctaaaaccataaataacctagaagaaaacctaggcattaccattcaggacataggcatgggcaaggacttcatgtctaaaacacaaaaagcaatagcaacaaaagaaaaaattgacaaatgggatctaattaagagcttctgcacagcaaaagaaactaccatcagagtgaacaggcaacctacacaatgggagaaaattctcgcaacctactcatctgaccaagggcaatatccagaatctacaatgaactcaaacaaatttacaagaaaaaaacaaacaaccccatcaaaaagtgggcgaaggacatgaacagacacttctcaaaagaagacgtttatacagccaaaaaacacatgaaaaaatgctcatcatccctggccatcagagaaatgcaaatcaaaaccacaatgagataccatctcacaccagttagaatggcaatcattaaaaagtcaggaaacaacaggtgctggagaggatgtggagaaataggaacactttgacactgttggtgggactgtaaactagttcaaccattgtggaagtcagtgtggcgattcctcagggatgtagaactggaaataccatttgacccagccatcccattactgggtatatacccaaaggattataaatcatgctgctataaagacacatgcacacatatgtttattgccgcgttattcacgatagcaaagacttggaaccaacccaaatgtccaacaatgatagactggattaagaaaatgtggcacgtatacaccatggaatactatgcagccataaaaaaatgatgagttcacgtcctttgtagggacatggatgaaattggaaatcatcattctcagtaaactatcgcaagaacaaaaaaccaaacaccgcatattctcactcataggtgggaactgaacaaggagatcacatggacacaggaaggggaatatcacactcaggggactgttgtggggtggggggaggggggagggatagcattaggagatatacctaatgctagatgacatgttagtgggtgcagcgtaccagcatggcacatgtatacatatgtaactaacctgcacaatgggcacatgtacccaaaaacttaaagtatataaaaaaaaaaaaagtgtgtgccactccacccttgctctcttggccctgctctcgccatgtaatttgctggctccctcatcatcttttaccatgagtaaaagctctctgaggcctcgctggaacttgagcagatgctcgtgccatgctttctgtacagcctgcagaatcatgagccaattaaaactctcttctttataaattacccagtctctgacatatttctttatggcaatgctaatacagcctaacacacctactcacaatgtttgaaatgttcctcattcactctggaataaagacaaatacatttatgtaacatacagtgctcttcgtatgggcatacgttcctggtaatttatcactacatccctgataataccaaattgcaacttcctgtaatcatttgcagtgtccccaacacagcataattatttctgcgtaaaaacgttcacatccctgcttctcctgctagagaaaccttcctctgactctacatagtgaatctctgttcatccctcaaacttcagctctgatatcctcagtttcaagaatgtaaacctgtgctgccaaaaattcacgttctcactactattgtaatacatattctaggtgcttatttatctatgtctccttttcctctaaaagctccttttgttctaaagctccagaatcttatcttatttttaggggccagaaatgtttcttgaatttagtacgtatttagtgaatgttcgttgaacaaatacataaatggaagttgataatagattctgacatttatctcagagacctgctctaatctatttcattacttctgtagacagtaatatatctctgcggctatacattcagaaagtcacagcaacaaaggtacagtatgcacataatcgtgaacttacatccatatcaaacaaaaatgtgaagcttgacatttcaggctttatgggttcaatagttccttctgaaggcagcttgactctattactacgctgtaaacatccagaaacatgtgaagaaagcgaccagagttcttggaagtgctcgtagacaactaagcaatcctttatgtatgtttgtatgatgtgtctgcgatttagtgtcaagtgaggggtatggagaaaatgacataggtggatgttacgaagaaaaatgcaaacactatttaggattgtcaactgaagttctttgaacagaggctgtggataattaaaatttgtctaaaatatatatgcatttaaaactttgtggtattttctaccacataacaacacagtgatctcaaaaaataggttaatttgctttaaatatggcatacgttaaagaatgtacaaaggatgtacattttgaacaaaatgtctaagatataaagctctaaataactttttgctcaaaatttattaaagaattatgtattgatttcataatatgtgtgagaaacaatggttagttctcaagaagcagaggaagagagacagagggagaacctgaagaactttccacttattatacttacatttcaaaacggggatgcaacaaatataaataaatatatagaatattatgcattaactagtattgaacatgaaaataaagtaggattttggagttactgaacaggagggattgcgttttaatacaggatgctcagggaaatgctactgggaatggcgtcttctgatccaagaaggaaggaaggagtgagtcagctctaagggtctggggacaaggaggcatcagggagtgaacgggagctgaggtgggagtggtttattgttccttgaacctcaacgaggcctggggggcttgaatacagaaagtgaggtagagaggagtgaacgagatgagctcacagaggtactgggagcctgtaagtgagagtatcaatgtccatcatcagaaccttatgaatgagatggaaaattattagagggctttgcacagatggagaattaacttgatttggctagcagtagttctttcaaagaatcactgtagctgtgaagtagatgatgaactctgtgttgggtagaggcatgtgtgactacattaaaagtaaaaagaatggttaaaagtctgcagtgataagcagtgaaatatcatcgtggtttggacgaagaagagtagtggaggtggtaagaagagactagatcgtggatatattttgatgttagaaccattaaaataagataaaaaattggaatacggttttagagaaaaacagaaaccaaggaggacaccaagtttcttgaattaacacctgcaagtgccatttactgagataagcaaggccatgggaggaactgttcaaggacgtctgggccggaaataaaaacacagtagcgacaacttggaaaaggttcttggaatcatgaaatccggtgacagcctaaagggatttggggtagctagaaagttgaagacctcccaagtgtgactccaagtcttaagatgttcagaagtcaggaacatgaggaaggactggtagagccgtgggagacacagcaccaagagaggctggagggaaactaagagagataatggccacaaagccaagtcagggtgcccaagagggaaccagcaaatacccccgtagatcaaggggaacacactctgacagcgacccttgggcttgacaatgtgaggtccctggtgattctggtgaacactgttatagtagccggaaagctcagtggctaggatcatgaaaaatgaaataataaattactgagtttacattaataattagaaatatgaattgacaaggtgcttcatttctcttcacctcagtttttactattcatctccaaaatgaggaaaaataatcatgtgttttgagaattatctgagaatacatatacaaatttttagaacggcgcatggtatataaaaagctctcaataaatggcagttattgtcatattatcataaaatcatagaagtccttggccaacattattatgaatgcaagccttaagtaaagagaatgcctttggccctccccatgagactcaatagaccagagcatgaatccagattctagaacattcatttttaaattttatacatattctagtaacatttagttcagtgttgaatattttaatgaaaagggtaactcattcctattggtatcccatattctcattcctgcatttttttagcaacaattttgcacaatctcttcatattctcacaaaaacaacactcccacctctccatatccacccaggggacacagcaagaatgtctaatttgaatctaaatgtgtgcatatcttagatttaattaatcaacaataaaagacttatcctttgaaaaatgtatacaatgtaacttgtgcttttgataaatgtgttgatttgtatattttctttacttggagtacatttgaatagaacatgaaaatcctttaggaaaaagaaatgaaattttttatactttttcttgattttattctgccttcacaaaattgtataaattaaattaaaagcaaaaaggaagtgaaatgttatttttcttcataaataaatcctaaaataaatgtcaagacatgattgaaaaatgattcatattttattcagtacatgtctatatatggcaatatgctttacattaatagcatgtttatttcatggaccactttttgccatgttacaagtaaaaaagtgtaattatataactcagtctataaaattatagttgaaaactttgtctgggtattttttattaaattgatcacttctgtggattttcccgacacctcaaataataatgaagtacaaccaaaacagactgaatttcaagttgctagtaaagtgtccaaaataacatacttagcattttgagaaatacatacctacacacacaaagacacacacacacaaatttagaactaaaaaaggatgatgccaaattgacgacatataattagaatgaaaacaaaaaacaagtaattacgtaaaaatgtatttgtctttcaatggtttaaaaaatatcacttccttactttactatatccacaaatttgcctttaattatctacttcaatagacaaaaatcattgctcagaaaccctataacattgtttgatttctatttagtttttgcatatgtgatttttttatgggcagagtgatcatcataattatgttttgccagagttcataatgatctttattttatatcattattatagttactagctttattaattttaaaattgtattcaatgaatacacacaagcagatattaatagttctactaacctggtttaaataaaggtctctgcagaaactacctttgaattttaaaaaattcgaagtatattttccatatgagtcataacaatttgattattttcatacgttagctaaagcagataatttttgtattctctgtaatcttttcattgtatataacatttaaagtaattggcctaatatcactgaaatattggattctactacacacacacacacacacacaaacacacacacacacacttgatataactgttctacaacactggtattctgaaagacatatttaaatattataatattattatataatttgaaaatttagtctgattttttaaattttaaaattttatttttgtgtttgctttattttttaaatttttatttcaataggttttggggtacacgtggttttctgttacctggatgaattatgtaatagtgataaaattcaaagttttataacattttacacaactaatcttattcttgttttactttaatgacatgttctaatatcattctcatgcataatgataagtcctttatttaaaaaattaaatacttgtaccaacataaaacttctatgttattcatcctaagaaaatactacatactgcttctgttttgaataaagagaaaatctcattaagaatctcgtaacttactgcaagacgaaatcagcaactgacttgtcattttctttctgcctataactgatgactttgagtaatatatacacagcttcaataggttgtcattttctttctgcctataactgatgactttgagtaatatatacacagcttcagtaggtttcctcgtactttaaacatgatgcaacaatatattagaaaatcacttggagaagaatgtcgctcatcaccccaacatggaatgcaatgattccaatttccactgttgcatacgccttttcagtttccatttttacgaagatctaagtacaatgcacttcaattttgcatttttatttttataatcattgggaggggtacttccatcaatcagatttgttctaatgcaaaatgtatctaaatttacttaatataagagagaaaagctcaaccctagccccaaacaaaacctcaatctatgcattgcccagttttttaaaaggtcctcctttaaaaattaatcttctttcttatgcattttgggacctattttttccatttaattttaaccaaatttaatcataggtttgaaagaaaaatcactgaggagctttcatcttcctgtgtagataacttgaaaattttttaaaaatatatttacacaggaagtccttgagatgtaacttaatagcaacatctaaatttaaaaggctggtattatgtcatattaagtctctcagtttttgacaccttaatggttctgtgcctatgtgaaccatcaataacagtaatccaactgcactactaattcaaagtgactagaattatgtcatcctatgctgcaaagtttatgacatctgtttaagaggtggatgaccaccatttcatttaaaatgaaaagctttctataaaaacttaatgtaccaggctctcttgaaattcacattaaatctcttcactttcttggttcttagtactcttgcaaatattttattatctagtgatctattgacttctccagagatttctttacaaactgacaaccaaaaataacaactactgtctttgaagagtaacctcctgtggttaacatctctctaattgtttctctaagataatcttgataaaagaagtttgttctattctcttttgtttttttctttaaaaagtgcattttagcatctactttatgctaggtacttttaatccccacaacataagtgttattggcttttttaacaactaaataaatagaaacccagagaagctcagctctttccccaatgacacacaacttataagtagctgagtcataacctcaaatgagattcatatgctggttctaatgctctcttctctttaccagatttacaatgaaataaataaaaaataagatactaatttaacacaaacaataattttcaacctcgatcgttcaaactcattttttaaaattattataaacacaaggtaatggacgaaaagcaaaaatattccaatgatacaggatccttaccttttcatgatttttaaaaattataactttaccattaatataaaacttttacattttgtgacctccttaattataatttatttgccattattttaatggcaaaaaccacaattacttttgcaccaacctatatggaacaatcttaaatactagagacattgtatttcctcagcatattactactcaattctcggcaggctttgattgcgtttttgttttttgctcaaattaagccatacagaaagtaatattttgcttagaatttaagaaaataaagtgacccttgtgatatgaacttcatgaactacacacatattatttatatttacaatttatttaaccactgtgacagcaaaaaactaaaaaatggtgcatcgttccaatcatttgccaagctaagaaagctggagtgtttgggggttgttaaatatgcaaattgataaacactccctactcatcaatgtgcttctggaaaattaattgccccactgtttatatcttgtcattgaagagcattcgattaatttctttcctctttaaatagttggccaacacttaattatttgaaaggtattactaagatgcagaacttaaatacacccctgtaaataaagacattccaataaagtataattatttataggcagcaattatctgaggccaacactcttcctatcccagccaacctcggatataattttttttacctttgagtaagcaaattgcaagggatagtcccagagcagccataatttcgcttttttcatcagcgctgtatttttgtatcaccttgcacttaactttattatgtcgcaatgccagattggaaatagaatgatggtgctgagaaaagttatatgtttagaatcccttgatttgtgtgtgtgtaaattgtcaaacaaaatgccgtattagtattcaatgcagttaggtttttagtagcttaaagataagagtgttttgatccctctaataaatacattcattttactacatgtggcaacatttaacagagtgtaaattctcaatattttatatcattacagtattacacattaaatatgttgccacaagacacggagttgaattttcgagctaagaccctactgtctacgtgtgtgtgtttctacaagtgccttagatatttacacgtttgtacatcctttaaattcagttcacaaaactgctaaatgcggaaatggctcttgaaaaatcactgctttccctggatctctactttgtctcttatttactggaaaaagcaatttaaaacgacctctcaccaaactgctgtagttgccttacctgcaaaattgagaaataatgggttgatgggagaattaaataaatttacatatgcaaactgtttagaaaaatgcctgagcctactctgtatgttattttattagtcgtattattttctttcctttaagacagagtttcacactttcacccaggctggagagcagtggcgcgatctcggctcagtgaaacctccatcccctgggttcgagcgattcgcctgcttcagcctccccagtaaactgagatgacaggtgcacaccactacacccgactaatttttgtacttttagtagagaccggggttttgccacattgatcaggctggtctcaaactcctgacctcaggtgatccgcctgcctcggtctcccaaagtgctaaaatgacagtcgtattattttcatattagtgttagtgggatcattattgttaccgttattattaaaaaaccaatcattttcattcgtctaaattgaggcataatgaacaagtgttcaatcatctacttaattctgaaggtaattgaaaattattacctaagaataaaaacacaactaacagtatggtgtcttggtcgaaagtatttgatgcggtaccagttagaactagatttgacactggtgactgtcaaatattggctgtgtaagcttgtaaaaattgtaaaaaaaaagcttgtaaaaatatcatgtgctgtatcagctcctctacaaaatagaaattgataaccaatttcagatgatttttgagaggattgaatgaagtaatatttgcacgttttctaacagggcaatcactcatatgtgtgtagttataggtatagattatacctatatacacacagagacatacaaatagaatagatgatataaagataatatatatacattttatattttgttatatattactacataccatttccaaacattatcatcagtttccagttgaattttaaaagagaaacaatttctcattgtattatttttaaataaatttataaatgtcatcaaatttgtgacacaaaataaatctatctagtaataaatatggcaataataattttgtacacctgctataatttagaactgtattttcccatagaaaagcatctgtgtggctatgaacgtatatattatcatttaacatagtgctaattccatcctgttttatcatttgatggaaacagtggaggagttgtgtctgtagggaaactggatctctttcctttatgttaatgctctctgtattttaatcactcgaatttcataactttgagttacttgactttcacttaccaaatatttggtaatcactaaattttaatgaaagcatatatctgcaaccagactatataatgcagtcaaaagtttaaactcaaggtagttgatatctaggatagtgtatctatttatatttttttactgcatggctgttatgaaaagcctattttgtgttaaatgttgtagtttagttaatgatcacattctttaaaaagtatgaatttcttcttatattctctgctaatacagatttttaaaaaacattagggcaccattttctctgattattaatcttgaaaataccttcccaattcatgaagtaataaaacgttccatggaatagagcaaaaccaaaagcaaacacattctacttacacatctgtttctttattgtctgcctgatgttaattatggctggtctttaatttatcatatattctctctctcttttttatattctcttttttcaatgaaaagaagttaatgttagatttaagaattttagagtataaaagtggtctcttatattgtcctaatctacaataatcttataattggttaaggtgacatttaagaattgaaaataatgcataacacatgtccgtttttatggacaaccgtaaagtatgtattcctgtgtaccagaaccgcagacttcaagacttttgtgaataaaagtgatattcaatattgcacactcttgatttatttatattcagttaatctaattacatatacttataaaatgtttaaacatcatggaaatttataaagtaaataatgaaaaaataactgttaattccctggtccttcttcatcccacaactcaaaagtaaaaactggaaacatctaggtttccctctataactttttatatatgggtaaaaattggaacagaaagacccacatcacttttgaaaactaggcaacaatcatatttttatgcactgctatttatttcacctaacaagagttcagaaacccttcaacagagctagacctcaattttcttaaaggatgcatagtattccataacttgaatgcactgaaatgtatagagccagtctttcttttgatagacatgtttgggttttcactgtcacatgcaacttggccaaggagtctgcatacattcctcttctcgtgtgtcagtctcagccaggcttctctagaatcagagcaggaggcaagctttcagtgtggatactttattaggaggtaaaatcccagcgcaccacgagtgagggaatggagaaacagagtacagaagtagggagagcaaagggaagatgtcacgggacaaagccagcctttgccttccagacattcatttaactatgtgagcctgctccattcaggctgagcagaaccctggtcctcggaaaatgccaccgaggaagaaagagcgaggagtgcatttgctggctcccctctgcttcagatgaatccaagtttgtcccacagttcctgattgtgtcacctggccctttgggcttcaaccatggagccaggtatcacacactgcagggatggagcctcattcaaatccccagtgctgagaagagtcagggactcaggggatgccacagggtctggtctgggtgtcagagctgtgctcaccctggggagctgggagagtcagcagtgctgggaggtgaggcagttgcaacagctctggcctgggccatgggaggaggcagtagctggggctgggagataggtgcagccgtgatgagaatctagggaaggcaaataagtagcatgggattcatcatgtatgagtatttccataggattttgttctaagaaaggaagtgggtggtccagagctagcatgtggctattgtgacagcccattttcttaggaaattttaaatttccactgcaatgcacttcttgccttctttcacggatttagattttctgatgcttccagctatgcatattgatataaatggcatttccaaagcccaacaggtattttcaacctgaatacatttatctaacaccatgagttccagtacagtggcaattcccgctgagccacataaagaaagatgcgtgtgaatataatcaagttgacccaacgcccgtgtatctgtaaatgaatggtctcaccaagcacccaacatattagtgttttgtttttatgttttgcttttattatttttgataaggcaaagatcaaatggttttcatgaaacagttggaaagccatagcagtaacccagatagcaaacaactcttctttaggaactatatcataaaattaaatattaatgaatctagcaaaaatcccaagtagcagctcaatgcataatttcagagttcatattattgtatgggagcttatttttccctcttttgaaactgtacatttagattgtacacttttgaaaaacctttccagtaacatcagaggacaggcaggttctgtgcttgccagcaggtctccagttggtcattgcttgatggatgacacctgtctttccttgcaattctgtactctgtctctggttttcatttacccactatctctatggtctggaccaagcataggtgacagcagcacggccccagcattttgcagaaacacatcgtgctgatcatttgcaaaatcctcatggctcctgcagacaatattaataaataacttgcaaattccctagtatgtgtcaggctctgttgtcactgctttaaatatattaactcattttatcctcacaacaatgtattgaatatgtagcaaatgaatgcaaactaaggcactctgtgttagcctgtgtgactcaagtaaggcatagaggccttggagttgggacgacaatatttacttcctttttctctgtgtgtgtttttgcaatactgcctgatatggttaggctttgtgtccccacccaaatctcatcttgaattataatccccatcatctccacatgtcaaggaagagaacaggtggaggtaattgaatcatgggagtggtttccctgatgctgctctcatgatagcaggtgagttcctatgaagtctgacggttttataagaggattcctcccatcactcagcactccttcctgccgccttctgaagaaggcacctggttccctttcaccttccaccatcattgtaagtttcctgaggcttccccaaccctgcagaactgtgagtcaattaaaacactttcctttataaattacccagtctcaggcagttctttacagtggtatgaaaacagtctaatacactgcctcagaaattgcgagagtagaattcacaatacaacttgcaaggaacacagagacagaaagagacagagaagagcctgtggattaaaagataattaaaagatatcttgcacatttataattcatagttcactttttgtgatcaaaccttctgtgttactgtttttgccctttatgaaacaagttgaaatttgaacacttgctggatattggctcatactggagtagtactggcgaatactttgtgcgatgtctgaattttttgacatatgttttattttatttccatctctattgaagtatgactggcaaacaaaaattgtatatatttaaggtgtacagtgtgtgatgctttgatatatgcaagcattgtgaaatggttaccacaaatcgtatatatttaaggtgtacaatatgatgttttcgtatatgtatacattgtaacatggttaccaaaatgaaggtatataacatgtcatctgattctataaaatgacatgttggtcctgattcatttcaaaatgataggaggtggcaacaatgagtaatctgtatttaattattggggtttggtggtgggaattttgcagaggtttgaaattcactcagatcaaaatctcttaaaaactatctaaaaaatgccttttaaaattcacattcgtagacccattccaaacagtgagatatgtgtgtttggtttgtatgaacatgacacgcagatcagcgatagaggagagactcccggacactcagcaggaaatcaactaagactctagaatctaactcagagaatattcccttcttgagaaaaaattccagaaattttacttcttaaaactgaccttagtggaactggaaatgcttcaacttgtgtgtagtatcttaacagcatctaagaacatatgatacttcaaagttgctgacaagaaacaattcaacttttttcaaggctagaaatctaattaagcaatcgatcaatgttcattcctccattcaactttccatctatccattcagtaaacacttattgatgatacagtagagaactaatcaaactaaaccaatatttggcttcaaggagctcaaagccttgaaaaatatgtagcacctattttatagaaagtagcactgtgtttgaagctggaatcaacataaaggccatttcttataagttgttttatattttactctatataaaggtgattagatgaatactttttgaagcactacggcttttagacaaggcaattagaaagaagaaaggaaagaaggaagtatggaaggggaaaaaaagcaaggaactatttcaagctataaatatgcaatctcattcggagtaaataaccactatatgtgttgtaatcgcatgattagtctatcatctatctatctgtgtgtcatctacctttaccttaaaactttaacataggcaagcaccgcatcaggccttggtctgtagtattccacacctcagctactgatagataactttatctttttcaaaatagctttatacttgcatcataatgaatgaacaatgaacatgtgtgattaataagatcaagaaagccactgtataattggccgtggttttcatcaaattacgtgggatactgcctaaaatcgcattctaaaatctaaatttctatttatcaattagtttattttaatttgcagtacttattaatacataaatgaaaagaaagggatggtggaggagatctttcaatccgattgtatttttttttttttttttctgagacggagtcttgctctgtcacccaggctggcatgcagtgttccattctcgactcactgcaatctctgcctcccaggttcaagcagttctcctgcctcagcctcctgagcagctgggattacgggtgcctgccacctctcccggctaatttttgtattttttagtaaagatggggtttcactatgttggccaggctggtctcgaactcctgacctcaggtgatctacccaccttggcctcccagagtcctgggatcagttggcatcttatgtagaatagctaacagtgaatttacttatttttgaattatatctgaattcttaacaccttaagttatatagatggatatttcatatagacagaaagaaatagagatagactttttgtgtgtgtatatatatatatttacacacacacttaattctggtttatatatatataatattaaatatagtatagtgtatatatagtatagagtatagtgtatatatagtatatactatattagatatttccacaagctttatttttcatttcatttttatcttttgcttttttctcctttatttccttctttcccttcccttcccttcttttcttccttttctcccttcctcttctctctccctctctgtctttctttctttcttcctttctttttttgtaagaaaatctttcctggtatttggaattcagagtaaatacagaagccctccttccctcatggtaaggtagtatgtgctctgcctacaaatcttgaaagattcgtgtctctttctctgtacagtagtactttaaaagctgagaaggaaaataagcatgagaattatatatgaacaagcgctatacccaagtcctctggtaatatacaagctcactgattctcagttcgaaaatatgatatgaccttgtaataacatgcgacggttattgaatattttggaactgaaaagtgacttgttttcttctatcaagcctttatttctccagaataaattgttaaacaggggagggagttctatcctaaatatgaattaaagctaaaagccattttacatgtttggatgcaaagcgtctcacttgagcaactccatgagatgaagctttggcatttgtctagcgccatctactgtccaactcaagcagaagcatagatcttgtcaccatgattcgaagctggttttgccctctaagcgtagcttgagttgtttgcaataggatatgattggaaaaagaagagaaattacaacaaatctgagaaaagtaatcagttataaacctaagtagagctgagaaaccaagataaatactaacaaatatgtatataggtatgctcaaacaagcaaccttaaattcagaggatagggaactctaagatataatggtttgtatataaaaatgaacacacagagacagacacacacacacacacacaaacactagtataatctgaaataatttatgaaagccatttagtgaatatttaattactcaaaagagtctttaatagcaacaatttaaagaattttcttcattaataagagatgctatttttcacattttcttatgaacacgatttttatttttatagtaaagagtaaaaagttagaattttagtaaggggaaaaaacctatcaattcaattcttcagaaaactagcagatagcctaatgagtataacaaaaaagtacagtaagttcagcttggtttgaacaatggtaaaattaaggaatacaaatgactgcttagtctatttccctgctgggtaataacataaatttacctaaatatgtaggccacttttggagctcagtctttcagtaatctgctactgtggtataatattaccctccatgacaattcatatgctgcaatcattgcttctttaaaggagagtggtattcatgggcaacagaattaacttaaaatctacaggtaacaaacaattgtgaaaaaatgcatacctctctgaaatacagagcaaaccgttaaaggagtacaagtggcctgtttttgtaaagatctttacttcatacatactaagaacaattttaaaaattgtacacttagttattggaattagattgcttttaacaagactatgtgtaaacatttaagcaaatcagcacatttcaatgctttctcaattttcaccgtacaaggatgcttattcataatatagcctttttttgtaaacttagcacatcagttcacaataggttatttaggaaaagcacaatgcaatgtgttgtgttttaagtgccgttaggtgcatatagtctccttctgtgctaatttctaagacaatatcatgacctctttcttgtgtgctgagtgtaccagtttacatctggagtcatttctcagttttttgggggtgttttatttttccttctcagatctaaattagttcaagtaatagaagttaagatcaagaagattttcacaacattgtaggtaagaatgagcaaaaaggcaaagaacacattgattcaaggagattagctttctcctaatccatgcacacaaaaattattacacattatgtaattttatgacaattaaaaatatatacaataagtataatacaaagataaaagagtttctcagaaagaaaaataaaaggcatcctccttatgtggagattaattttaacagttatttctttcaaatacactacttattgaattccatttataaagatttaagtttttctttttatcatgctctttttcatgacacattttacacttgaagatgtgtcttttgacaatggcccctgaatgagtatgcaatgtagctgaataaaacaggagcataaatctaaacagatgtacataagaagatcccaatttgtagccagtattttgactattacaggaaatataagattggctgcatttaaaaattttacattaatcagggttaagataaattatgttattttacatttctgtttatcataaagaactacagaaaaaaggagtaataattccattgtaaagaaatatcaattatgtatttctgtcccttataaacaccagatgttataaagtcatatttgctatttcaaagtagctcctaaaatctcttcccgatcccctaaacttcctcctagttcttcttcatatcaatgcattgcactaagttcagccagttacccatgccatttactcataaccatttctcccatctcactttcctaatttcctaatcctatatttccaagtcctgccaaatatagccaataaacacaaattgaaactatctcccctattccatctggaattatttccatattatctttaaagaggaagacagactatgtgtttgcactttcaaaggatgtattcatgcctgtaaaaagtacagtcctagagatttggtgactcaaatcttttcactaacaggcccgtcttctttgccttcaagtgaaaatatttaaacaacaaattgctctacccagtgtagcatcaaggaacatcattgagaaggaaatttccatcatgtacaatgggaaagggacctacccaaacagagacacactataatccaaacacatatgtatgtgcacacccatgaccctgttcagaaataggacctgtcagcatcccatcaccacataaaacctatttgatctgagcttaagaatctctgtaaaatgatgccattgtctgagtatgtgaccagtaaccctcagcgtgttctgttttggctttcctcagaagtggagtctaagaaaattattttagaatgagcagtttgttttggaggtggttcttaaaatcactcacaagaaaagataaggtgagaaaagaaaagaaagggtcagggaaggaaaggaaaaaagtaaattaatggtgctttcttgaccaacttaacacaacgcgaggcaattagaactcatctttctgcagaactcgggaaaatgtacacataagttgtgtcatttgatggaagcctaaactataccattaaatatagctttcattttgtagaaagtattagtaatatatgattaaaaatgtccttgtgggttttttggaggaaggtaggtagaggtaagacagcatagaatcatgatgatgatgatgatgatgatttttattattattcagaatgattatttcttgtacaacccccaaaagtcaatagaatacaagacacaaaaagagagcataatttctatcaccagttagtagaggtgctggaaattatgctctctcaaaatttcaaaggaaatttcattacttgtgaaatgtgtagggtcttatattctgtattttacccatttttacagttgaaatggcacccagcagtatcttttgtgtagaaaacattcacagtaaatttgtgggttttaagattatagtttgagtttatccctcctctatgaagctgaaaaacagtacagaggagaaatttttaatatgtcaccgagacttgcaggataaggcagaacccagacacacaaaaagctgatgatgctccgagcagagagaacgacaaggtgaagaggacgacaaggtgaagaggacctgccaaggcacagtgagaagcagggagaggggtcatgggagaacaggatgggtgagggcaagggacaggatatttggggtttgagaaaagatttcaagggttaaggtagtaagacttgatattgtagacactaagtaagctttgcaaacaaacaaaaaaagatatcatttacgtattgagcaaacaaaatatggtggcagctttaaaaaatataataaaggaaggagaataggcaggcacagagagacaggccaatggctgcagcgtttcatgaacagggacaaggacatcaactcgaggaaaggttgcggaaatggaataggggagatagtttcaatttgtgtttattggctatatttagcaggacttggaaatataggattaggaagttaggaaagtgagatgggagaaatggttatgaataaatggcatgagtaactggctgaacttagtgcaatgaattgatatgaagaagaattaggaggaagtttaggggatcgggaagatattttaggagctactttgaaatagcaaatatgaatttataacatctgctgtttataagggacagaaatacataattggtatttctttacaagaaaatgaatacgatttctagggagatttttataaaacgaagaagaaaataaggagactgtagttacagaatcaacaacagttaaagagccagaataggaaagtctgagataaactggcccatagaaagcaggagaatcgggagaggtggagcactgcgaaaaaaagtgctattagaaagggattgggactttcataatgttatagaaccggaaatctcaagtgacaggggacagatgaatgcatttaaccatgtatgcatctctcaaaacatcatgttgtgtaagataaaaatatgcaatttttatttggcaaataaaatcgatcaatcaaatcagtcaggatgttcttacaagtctggattttatctcattaacttcccaaccagaattcattttgtcgttgttgttgaggttcattccctttgttgtaaaagcaatattatatctgaatcatccattggctgatttatttctggctttaaaagtatttttggctttaaaagtaatctcctacctttctgctgaacttattagttttggccgttgtaatcttattatttcggtctaagaaactctgccactttctgctggaagatattgtgatatgtttcccagacatgtggctgaatttctctttcaggagagagttaagggaagaacacactgctatcatttttcggagatacgcattcagtgacctgttccccaaaggatggagaaaaaaaatgaagttagctttggggatctcacacaccaccttgattccactgcaaactcataggctgcagctaagatagtcaaatttacttgacgtctgaacacacaaaccacttgtttgcctccaaaagagaaggcatcagagtatcgtaggactccttacagatgtatgatgactcggtgatgtctgagaagagaggaatttcctgtgctgttgtgtagcccatgaattctgtcatacagaaccactccctttaaatgtcaccttttccttcgcctcctcctctgaaatcctctttactacatagacacacttcctgtgttctcaaagcccacattgcctctattggatttgagatttactcagttcgaagcgtcccgatgaagcaatcggaagtggagacagagagacttttctgccgtgcctgttctgcccatcgcataatcataaatatcccacgtgtccatgataagatgagttggaacaatcttttgccttcaatatactcatttctttgtgcattttcttcctgcactcagaaaaagttttcacttttgttgtcattcttgtcatgaaaggtccctgatctaagctatttagtattattcatgctttatagaaagagaatttaagaaatgttacattccttatttactatctttggacttagcaaacacccagaatgggccaggaatccatgttctcactatttctgaaaccagtaatgaggcctttcctttcctttcccacctatccaaatcctcccatttttcagggctcagttcccaactcttttcctagaggactctgccagctactccagcccacattgttcttcccctattaatagtatcactggcaattataatcttgatttaatcatatttcactttgagtttctagatttagcagtttcctttgtgtgctatgtgaaaaataaattatacataggtccattctagtacttctcactgagttatcaatatgtggtctctctgtgacttcattgccagactgtgccctctacaaggatagtgacaatgcatttttttatttgaatacataataactaatatactatggttacacagtaactattttgtgagcaattaaatggatatagttgaacaaatatacctagtatacatatctatctatctatctatctatctatctatctatctatctatctatctatcttgtctccctacatgcaataaacccttgcctatagaattaggctcttccaggtcagaaactcgaagttagttttttttttttttttttatctcatttacgcctcaatatattttacaagctcaaatttattcaataaattcatgtttaattgatttcttaaatttggaaataaaaaactatgcaaagttttaaatacataaagagtctttaaggtattctgcaacctcagcccttccacttgatattttgaataaaaagcatgcagcagtggtctttttctttagagaccacactgttgacattgtacagcattttattcacaaactgcatggaataagatgatttgggcctataagtaaaagccaagattctacaattcgagcattattttgttttgttatttttcaacacttttatgaggcaggggaaaaacattgatgctggacacttttgtggggttcttcttgcagggagaatcagcttcatgcaatgaaaaggatatgacatggggctcagctatacctggaaagaaatctcagcccttccaacacttatttgcaatcctgggcaagtaatctcactgaatttctgttttcttatttagaaagtacgaataataagccctcatttaaccacagtattttgtaaaataaactagagtaggctgatgaagcacatgtagttacaagtgctggaaatcccagtctccttggcactagacggtggtgtacactgcgtggtggatttcccacacactgggaccagcatcctctacgtgccctgagggtggatgtcgccccttctcctcccacctctctaactcacgtggctgaatggcatacggcagacaaacgacctctcctgacatgtcgcctgcttggtttgcttgggcaatggggagtaccggagggaaattgaagagtattggggagcgagtttggcattgtgtggctttagcttcaaattccggagggaatttgaagagtattggggggcgagtttggcgttttgttgctttagcttcttcctgttttcaaaggaaggcttcctctcccacaggtaatggtttctgtccgtggcctctgctgaggcaaccccactttccctaagaacattcaaccccaagcatagagaaagatgcaatgaggtattcaactatccaccgggtttcccatgctctgtgtacaacgttgtagactcttcaaattattccatttgatgtgccgtttatttcctctgggaaccagactaaaacacctttataatatgttataatattataataattatcttttaaaaaaaacagaatgccttacactgaacacttcctcctttttcagtaacaaactgaggaaaactttctactttcctttgacttgaatattgggattaagactttgaaggaagaaagcaaaggaatgagagcaagtcctagatttcttcactagattaagtgaagaaaaccatcaagagggagctagcagtgttagctccaaactaaacctaaaaactgccaagacagaagagaaaattgacaattagctgagagctcctttccacaaagcaccaataacatcgttagagtgctatggattacttaagagcactagcagagaaaatctggagtcctctacaagattttatagtaaggtggaaaggaaatttaagaattcaatatcgcaatggggcatcgtcattttctcttgtgcaagaatgctgtagaatgctagcagaacatgacgtctaccagagcaacatggttgatttctaacaaggatcagataagagaatgatgaaagctaatatagatacaagataaatagagttacagataaatgtatataatacctctatttggatataattatcagatataatttacatatcataaaatttaccattttaaataatacgtttcagtggttttcagtatattgaaatgcaagatcatcaccactctctcattttgaacatttttatcatcccaaaaagaaatacccatgaccattagcagtcaatttattttctcctcatcaaccagatgttgacaaccactaccatattttccaaatctagacatttgccaattccaagcatttcgtataatagaatcacataatattttgtggctggcttctttcacttagtataatctgtcaaggttaattcatattgtagcatgtattagtactttatgctttttattgcggaataataaccaattgtatggccataccatattttgtgtatttattctttggttgatgggcatttgttattttttcacattttggttattatcaacaatgctgctatgaacattcatgtacacaaaaaatatttttttgtgagcatttattttaatttctcttagatttataactgggggtgaaatttctgggtcatatggtaactttatgtctaacattttgaggaactgccagactgttttccaaagagattgcaatatttcacatttccactagctgcctacgagccttccaatttcttccaatcctctacaatacttgctattgtctgtatttttgataatagccttcgtagtgaatgtcaaatggtgtctcactatggttggatttgcatttccctgatggcaaatgatattgaacaaatttccagaaggtgatctgtctactttactgggatcaatgtctattcacaccttttgcttcttttaaaaaatttggttgcctttttattattgagctgtaagaacttcgtgtgtgtgtgtgtgtgtacacacacacatacctatgtttatatatacatgttattttttctagttacaagtatcttaccagatagatgattcgcccaatttatctcccattctgtgggttatctttgtgttttcctgatgatttcctttgaggtacaacgtttagagttttgatgaagtccaatatctatatgtattttttgttgttgttgcttgtgcttttgcttttatctgaaaacaaaattgctttctacatgcctgtagagattcatgcctgtgttttctttgtaaggattttataattttagctctttcatttaggtcctttttgagttaatttttgtatattgagatggattgggcttcgacttcatcactttgcatttgaatatctagttgttctagcatatttgttgaaaagtctattactttatttgaattgtcttggcagtcatatcaaataacaattgcccagaaaaataagggtttatttttggactctcagtttccttccttggatcaataggtctatccttaagtcactgcaactctgtcttattgcggtagctttggaataagatttgggaagcatgagttctctaactttattcccccttttcaagactaccttgggtatttggggttctcttgaatttcaacataaattttagggtcagcttatcaatttttgcaacatagatataggtattgcattgaagcttcagcttaactgaagattgctgtagcaatatgaaatctcccaacacagaaattcagtatttcatcctatttatttaggtcttctttaattcttttaaacaatattttgttttcagagtataaatttgaacttctttgttaaaagtattattgcattcttttagaagctactgtaaatggaatggtattcttaattttatttgcagagtctcatttcaagtatatagaattacaattgatttgtctactttatctggtaacctgcaagcctgctaaattttatttttagatataatagttttttaatcgaatttcttagcattttccatgtccaagagtgtaccatcagaaatgagagatagttttccttcttttttttattattctggatgccttgtctttcattttcttgcctaatatgctttctaaaacctctagcacaatgttgaacagaagtaccaaaaaggcacatcgatgtcttgttcctgatcttagggggaaagcgtttagtcttttaacattaagtataatcttacatgtgcaattttcataaatgtcctttatcaagttgagaaacaccactgtaattcttgtttgttgattttattatgaggaggtgttggattttgtcaaatgctttttctgcattactgagatgattaggtggcttttgtcctttatcctgttgatatagtatatcacattaatagattttcaggtgttgaatcaacctttctttcttcattaaatataaaactatttttaatattagagatataataaagatatacttatgtattataatatatagtaaataaaaatgaaacaatattttcactttcctgatggtttcctttcatgtgcaaagttttgagttctgaggaaatccaatttatatatgtattatttgttgcttgtgtttttgctcttatctgaaaacaaaacaaaaaaatcaacactgctttctccatgctgacaaagatttatgcctgtgttttctttgtaaggattttatcattttagctcttacatttaggtctctgatcctttttatttacttatttacttatttatttacttatttgagacagtgtctccctctgttgtccaggctggactgcagtggtgcaatcttggatcactgcaacctccgtctcccaggttcagacgatcctcctgcctcagcctcctgagtagctgagaccacaggcacatgccacgactcccagctaatttttgtatttttagtaaagatcaggtttcaccatgttggccaggctggtctcaaactcctgacctcaagcaaaccactgcctcggcctctcaaaatgctggaatttctgatccgttttgagcttcaactttgtcactttgcatttgaatatctagttgttccagcactatatatatttttttattttatgtatattataaatgtatattccttaatacattattatgatgctggatttttcttgataatgttttgttgaggaaatttgcatctatattcataaaagatattggtctgtggatttctttatgatgtctttttagtttattggcatcaaatttctactgaccttgtaaaatgagttggaaagtgtttccttctcttttattttttgaaagtgtggatatatttacattaggtcttctttaattgtttcatataattcagcagtaaaactgtgatgcctggggtttccattgtgagtagatatttttatttccaagtaatcacagtacatatcacagattcattcagattttctatttcttcttgagtcacttttggtactcggtgtcttctttctaggacttctaaaaaaatttattttaccagatttgttggcataaatttattcttaaaatatttttatttctgtaaaattgttaaatgatctcttctgtcatttcagatttaagtaacttttctttttgctttaattggaaagtctatttaagactttttaaaaatatttagtcgatgttacataaccaacttttgatttcactcattttctgtgttttctattctgtatttcatcattttctgctcaactcttatatatttccttcctcttgcttggtttgtgttaatgttgataatccatttccaatgtgctaggtggaagtttaggatattaattggagatttttcttcttttatatataaacatttacagctataaatattcatctaagcccagttttacctgcattccataagatctgatatgttcagtcattatatgcctttaccgcaaagtattttataatttacattgtgattattttgcctcatgatttatttagttgtatgctgtttaatttccatacatgtagacttttcctagtttctactagaggcttttaactcaattacaatgtgttaaagaacatattttgtaggatttcaatccgtttaaatgtattaaggcttattttatgacgtaaatacagttatcatggacaacagttcatctgcaaatgagaaccgaggtatattagatttttttcacttggctacttttacaaacgtttttgttacgtgtagataattcatgatgctattcaattcttctagttccttgttattttttacatagttttttatttgttaacgaaagtgggatattgaagtcaccaaccattattttaatctatttctgctttttaattctattggttttgctttattttcaatatttattaattctactggttttgctttatttatatttgctttatttatttatttatttgctttatttgctttgttggtaggtgcatatatatttacatttgttatattttcctgatgagttgacaattttatcattttttttaaatgtctcacttcgtttctagtgacactttttgttttaaagtcttttttgagcagtgttcgtacagccactccagcttttgcatgactgatatttgcataatgcgttagttttcattcttttacttgaacatacacgtattttttatctaaagtgagtctcatgtagtcaatatatggttaaatctcatttttaaaatccagtctaacaatataggcttacatgcctctctctctttcccttccttttttgacccatatatgccacttctaggaatttactctgaagataaactttcaacaatgtaaaaatacatatgtacactcttaattataaaatattagaaataatctaaatgccatatataaaagagtatatgaataaattgatacattggtacatccatattgtattcatgaagtataataaaagaaagaaaaaatagaaagaaaataaagctatatttaggaatcgataaggagtaattttcaagatatgttgttaaatacacaccctctcctcacatcaagcccctggaggtaaccattatcattagttattgatttattatttttacatttccttttttaaaaaatgaggagatatatgtatattttcttatttcccattctttcattcaaaactgtcacacaacatatgatatacatatatattgttttgcacgtataggtgtgtgagcacacatacagaaggatagactgatagatgagagagagagagagagagagagaggtatgtgtgtgtttatgtgagagtctatggacccctgtaccctaactctatctgctaagaaggactacggcagtgacatcccaacaccaaaaagcaaattggtaaacagatcttcaccataaatatcatttgccaacaaaagaaaccaggggtccttgaggtaatgactcattccatggccggtgcagggaaagtgcaggccaagcctgggatatgtgttagggctaaaaagtaagaacatttccaaaaatcacaggacatatcaaaaggtcacaaaggccaacttgaagagacttccaataggcatctgggagattttcagcaacaaagagagtgaaataatagcaaagatttgtaacccatacattcacacaaattaataattaaatgagttaatgaatgaggagaagggaaaatctttacttacaatataattccaatttccaagcatcaaagaaatgatggaaatagaaaaatcaccatttggcaaacacgatggcatttattgtttcaggcaagaaggatgaatatgtggtaagcccagtgaatgaacgtttgatgagaaacggaatatgtgcaatgtccgaaagtatcactcacagtattttcattaatcacaaaaagaacaagttactttaaggtggagaatactgacagacatgccccaaccaagtgtcaaagctggtatcagtaggaatgactctgaaaacacaaaattagttctattattgccaaaaatccatagcctaaattgaatcatgaggaaacattagagaaactcaaattgaggagaattttatgaatcaagttttctacaaatgtgtcaacctcttgaaagataaggaagactgagaaaccaccaaatgcagtgagtaagcctgaatcctggctgggaaaagtagccaaaatttgaataagctttgtaggtgaggccattttttattaacattattttccttgcttatatccttgtgatatgtttatcattacaggaagttgtatgaaaggtagacaacaattcttgttatttttaaactgtctataagtgtgaaatgtcaaaaaaatagaaaaaaaaccataatgactggcttaaggttactggtagccataagagactgcaaatataaggttttatttaaagctggagagaaaaacagtaagtaaaggtaattaaaagcaaagaaaatttaccttaataggtccttggctatttttgacacattatattttatgtattcttcctagaacactaatagtgagggcctactatgttgaaacttgatgtgcaaaccacagccactagaattgctggagttactttgtatttattgatgatgaaacagagaatcaaaatgtatagcaatttgtccagttcacagagccagttttggaatgtggtcctctttacagccagaatgtatgacctttcaactacatcacaactatgaaacagaaatatatgacttcaggtatcttacctaataattaatatttcctgaggttcttgaggtgaaaggtaaaggtgctaaaactatgttcaatcagtttatacgtcagaaactagttctaagaaagaaaactattttatgatggcctctagaaaaatcccattttccccttaattttgttttaaagaaataatttctagtcattttagtcaatatctcataaacacacttgatcttggctcaggctggaagaagactgaagcagcacgatagagtggagtgaatttggtgagaaacgagaaatgcaaatgtctacgaagtaagctgaaaaggagagagaacctccaggttcctatggattagagtaggaaggcacatacaggggagatggcactcgggtcctcacagccatgggcatcctgggcaagacaggtgagagcgtgactccgacaccctcccgcaggacaggtgagaacgtgactctgacaccctcttctgcttcaggtcctcacagccatgggtatcctgggcaggacaggtgagagcgtgactctgacaccctcctctccttcaggtcctcacagtcatgggcatcctgggcaggacaggtgagagcgtgactctgacaccctcccctgcttcaggtcctcacagccatgggcatcctgggcaggacagatgagagcgtgtgactccgacaccctcccctgctttggttttgttctgcatgttattaggtcgctgcaaaagtaattgcggtgtttgcaattgaaagtcatggaagaaagcgcaatcacttttgcaccgacctaatacattccggttaaggacgcttttgtcgacattaagatgtgtgtttgctttagtcacagatcacattgagtgacaagaaacatgatttcagccaaacccctagagctcacaaggagggagtggtgcacctggggaaacgcaaaggcagagaatccaagggaaagtattggtggtgtttgatttcatagtaagaacacatgttttcaatcaagacctctccaaataaatagatatgtggaaatggttccattcattacatgcccaaattaatagttaatagaataatgggccattttccagctttggaactagcaaagccttcctgagagcagaggctgatgccacggtatgaactctgtgttttgagtcaatgagatttctgaaaatacatctggaagtgaaacatgtgacagtcacatctcactatgaagaggtaaaattctatgtgcaaataattgtacctatctctacatccttaggtaaaacaagaatactcttacaagtgaagacactaagctaacaatgtaaccttacttgaaagactgaagtttattgaagtgaattagagagcattttattcattgaataacttgacccttgatcaggttggtacattgagctttcattcctctgatacatgctactgtgtgtgaacctaatttaagtttacaatgtttttcttaatttgaaaggtctgtaattaaaagaattagacaatagtgttttatactaaaaatatttttatagggagtttgccttgaaattcctagcatcttgcaatttatttttcatctcttttaggaaatgtcttaagcacataatcggatgttttgctgaaagatgctgaatccaaatttattgaaattggaaacactatgtatttatcctaagggcttatattaatgcatacaaaaccactttaaagagttttcaaataaaatactgaattaattatttcccaaaactccctagttatttcagtcaagcaattatttagcaacccatgtagtctaacttaattaaatgcatttacattatttgtgtagactatacaccttgtattatccattgattgtaaaagttgacattcactgtattagattctattttagcaaacaaacagatggtaggttatcaacaataaaagaaaaaagaagatggcctttacagacataaattccaaaagaggtaagaccaaaatagctcttaaacactgtaatgagagcaccactaacaccaccagatgtagaaataaacattctgagtcagtagaaggtgcgggaggtaggaagaaatagaacttgctattttcttcctctctgtcacagggaaattttttttcccatttgtcacctgcaatttgaacaaagtagtttcattaaggcataattgaaacaacttttcaagattctttcaggccttaaaatacattgccaataaaatagtgctcttctaaaatggtaataccacctgggtagccaggtgtccctttattttaaaaggaagtcaatcacatactcagatggttgatacttaggtgacgaagccatctccacagcaagaaaaatggtgtgaacaagagcaagggggagttgagaatcctgagcttacagccctgcgtcctgtgtccctctactgcaaatagagattataaaaaaataggttcatgtcttttaatcacgttttactaactgaaaaatatagtaaatatttgcaaagacacctgggctaataagggtaatattacttgtactagcgttaggtattgcctaattatatttaaaaaatcatacagaaatatatacagaaaaaagtaaaagtagtctttccttagacgtgaacacttaacttttgagtgttttcttcttcagacttatgttttctatgcattcatatagtctttttgtacatttactgatatattgcttttaacacttttgctttctgatttgcatctcatttttattctttgtattatataataataatagggtataaatctaccttgtagatgggaacttctgtatgctactccatagtataaacacaccttaatttatttaacaatattcttactaagaggcattagactgttttccctttggctttataaagtattaatgaagtgaatatattttatatgccacatggtgcattaatatgagcatattgtgaaagatttccaaggaatacgcttgcacggtgtgatactgcatctgtgtttgtaatttgcatggtcaatgtcaaactgacttccaggaatgagggctgtgtcgattatcccctccagggctcgtcactggatattatctctctttctagtttttgtcagtgtgacaggtaaacataatacctttttgttgttttaatttgcttttctgtgattttcatcagctttattaactcactaaaatagttgtattggtatctgaatttcttcttttaattgcctacttaatatttttccaatgtttctaactgatgtttttcttgaactagaagctccttatatattctgtagagtaatccattattttatgttgtttagtatttttctgtcacttttttaactttgtttaccatgcttttattaatacagaattttttttcttaatgtttatattcacaaagatgtagttaaatgtttttctttatgtcttcagggtttatttgttgtctttaagagcttcccaattaatgtattataaaaatgcacattttaatttacccactttgaataataattttatgttttcctcaaacccagatgacaattcttttgtaaatgtgtgatgtatttacataaattacattttctgcaataagatatgctaatttgccaatacattttatgagaagccgaacttctttttcctaactggttcaaactgtcacctgtaccatagtctaaactcacatttacataaaagtcttcttctggactacttgctttgtttcattaatctatgtgctgctttcagagccaatgtcacattgttcagattccaatgtctttttagcatatgttgatatctggaacggtgagtagcatacagttgttcttaccccttttttccccaaaaacagaaaaaaatctatttaaccaagggggcggggcaatgtctttttcgcaaaatgttggtttaaatgttgtaaagctttttgtcttttttttaggtacagattttcaagaaggatttcaacatctgttatgtatagatacctttggattttctctttgatttattttgtttaagttgtattttcctagagaataatgaattttaactagcttaccaaaagtcttcatataggcctgcgcactgtatcccatacatttgaaaaattatctctattttaacagtgaacagtttttatgttattagctctttctatatgtcttatcagatatgcccaaacttcatccatttatttcagaatttgaagaataagctttgatcttttacctatcaagtcttttgttttgctttttcaaatttattgaatttatatacatttttcattttttatttaattttctactaattcactgcttgtagattcttaaaaacacttagataatttactttcatattctctctttcactctttctctgcccatttcaggttatgtattttgctttaagagctgcttgggaggctgaggcaggagaatcacttgaacccgggaggcagaggttgcagtgagccgagatcgcaccatcgcattccagcctggggacaacagcgagaactcatctcaaaaaagaaaaaaaaaaaaaaaagctacattggcaatattgtgaatgaaataatattctatccacccattatcatttatctgcaaatatctgcaaagggattttaatgtgtttcattcttgatttaagtcaagttatctgaaagactgtgtgtgtgtgtgtgtgtgtgtgtctgaggaggaccgagggggaccaagtgtgtttgtgtgcacatgtataaaatcttctgacttttaattttatttcctcatgaacggacaacttgatctgtgccaatttgcttttgaatttttattaaggttctctgtgtgactttatatgttattgttcatgaatccttgccaaaaatgcacattttcaaggaaggacactttgaaacataaggccaggaatcaaatggctgaggttcagggctcagcttccacttttctgatctactgccttcggcaagtaacttcacttctcttgacctgagttttttcattgataagaatatctgttttgtttctgtacattaaacatgagtaaatatgtttcactctcaggaactggttattaaagagttttcactcaaaaatacatttgatttacattcgcttctgtacaaaaaataataactatttgtagaaggttcaataataacaaaaaactaagctaaccatgtacaactaagacaacctgaatcacgttcagagatgaacaatttctgactcaggtgtgttacgattatgaaaatggtaagtccgtatgacttagttgtctttgtttctctccaatatttcagtttctggagtaatgtaagtgtaacagcatgtttagctcagtatgatgcaccaaacacatccctctttttcccatgcaaagcctgagtaaatttcattttctgtgatatcaacattgttattctgctttatcattggcatttgtctagtacatgttttctttcttaattcacagtctttttatacaaattttaaaagtcaaggagtgtttttactgataaagaaattttgctgattcaaaggtattgattatagttattcgggggcttctttttatgatatgactttcctactctgatgttgtggttggtctgatgaggctcctttttccaaattgctatccaccttcaccttccctgatttttttttttctcctcagtcttcaaacctacaaagcctctatttttctagtaattaaccaaagatattaaactttaccaaagtaaatttaaaatcaataagctgtacagctgctcctaaatcccctaaaatattgagaactttaccacgatattatttatcttcctttcacttgccttttgttacttcccctgttgtaaatacgttgaattttggttcagaattgttaccaattatttttttgacatcatccctccattttcagacctaattttcaatgtttaaattcttgccatcctcccctaaccattttctgattgagatatttgtaatgattctacaattctttgtagttcaatgtgtggtttgcactatttagaggccttcctctgtctgaaaatttttttctgccttctgaaatcaatgctacttttagtagcataaatatttttttaaacatttgaaagattgtttcctttgtctttcatattcagcatggcttttgtgaagtgtcttgtcagtctggttctttcaactttgcaggtcaccttgatccagtccgtctctatatgcttttccctagcatatcgctaattatgggtctctttacattcatgcttttcaatatttaattcacactttaatctgcatatttgagcttaacacagggagcattgcttttgcattttcaaaattatttactcgcttcgattatttactgatgttttctcaattcttttgttatggagcatctaccaggaaaatgttgaaactctcaaactgaaactctgtctctaaaatttttatcttatgttgtcactctctctgctctttgcttcatgtcttcagatacttccttcacctaaccttacacatactgatttaatatttaaccatgttcataaattatccattctgagtcccagtggaaaaacagaaaccactgcaagtatttaaatattggaaattttttccgggggaaggattgcatacgtgctggaagatccaagacttcaagcttgtgatgatggtgaggagtcctccgattctaagcaagattgaaggaataagggaaggaggtagtttcagggctccagcggggtagggcggggggaagtgcagggctatccagtgagagccggagccacggagggttgcagcagctgccgggaacactgtccaaggcaggaaaaagtaacagtatcttgggctcctttattcttcctacccgcctgtctccctgggcaaacccaaggaagggctctccatttacatttctttcatttttgtgatgtgtctcgttttttacactgacttctcttttcccatgacagttttatcaatgttttaaaactcaggagtaaaatcatgaccggcctttcctgagtgcctacaatttcaggcttgactttgggtattttatttaaatgaatttatgagcaaggcaggtgcacgttattatctcccgagtgcagaagaggaagctgtgcaatgtcaggggaggtagaataaaactcacaacacgtctgttttgtttctactgtgtcaaaatcctttcatcgtatcaaccaaaaatttaagtgttcatttaggtaagaaaaaaacggaaaaaataaaatagagttttaccaagtatgccaatatatattgtttctataggccatgggcgagtggggtaccaattcaatccattcaacaggaaaaaagttacaacaaatatgacttaccaagaaaacaagtgactcttttccacttgctgatgggaatatctttaaggagtggtttgggttgctgtagaccctggctataacctctcatatcctattcggtgacaaaattaaactatgtgctagtgtttaatagattgcaatttgttactccgttttataaattcttagtgaccaatacaattcaaaactcattatttgtcattacgttaatgtccaataatatgatattatttatacagtatcttaagccagcacaacttttttttacatattacttaaatacattctatctgcgtattgaagaataaattctactcatcaactgttactgcattatgttattttaagaattcaagttatatgccagtagatgatacagaagagacagagacttaaataagtttttgtataatgctaagaagagaaaggcaatctagattttgtagtctctacattacatcgtaaaccagagcaaggcgtggctttgttaagtggggacattagattctaaacataagtctaatttttataatatgcttagttttaaattatcccgggctactttcttttagctctgtactggaaaaacagacttcagtttataaaacaagaaaattaaagaaaatttggttttattagttggaaatatttagaaatggattattggttaaatgaagcaaacgaataagtaaataaatattgcccatatatatgtgtatatcctctgccttctgatatttgagggaggaatgcccagcgtgcattgctatattgcaaatggaatgattaaaacgcacacatgaacggagagcatcggggtgcttagatgacttgcccgttttaggccaaaaataaaatgttcattttgtatttttccaagacacctgtcatctttgacagggtccattagatttataattatttgttgcaatttctgtgtcacacctgccatttttttgcagtcaagtactagcaattcaggccacacagtgactgggtgatggtcacagaaggaccgcatgggtgtagaaagtgtaagtgagagccgaccaaaatccaaatgcttgcctgctcactcccattacagaaggacaataaaacaggtctttatgcctctgttcttttaaatccaagggtgagcatggctcacaaatcatatcctagttctttgaatggctaataacgacagtgtctggaatgaaattttttttatgaaaaatttttatgaaaattgtcaaattatacagacaggaaagactgagaaaaacgaaatggaatagattttattatatagtccttgaaaacctctctgactttcatgtaaatttagttcatcgttggaagcggggggaagtgaaatgaaaactgcataataaatatttatattttctattaatcaaaagttgtggcaggacagaaatgacagtgtggtttatttgtctaagttttaacataacagctagatacattatttatcgtttaataagattagatttagagataatgaattttattctgagattacagttataaaattatttttaatattacggtaatgatatctacttaaaaatagaaaagtgagagttttatgctaaacacaatcgactcctttggggacagcttgatcatttaaaatgtagccctatcctgtgatttaagtgtgatctgttacataaatctgaaatggtaatttggttatacacgtatcaataggcaaattgagctaaaacctttctctcaactgcatttatatgtgtgggtatatgtcctatcggaagaaacatcatttgaagcaaatacttcagagaagttttggttgaaattgtaaggtattgccatccatgcattataagcaaaacataacattattgataacataaattcttacctttaaaattgaagtggcatacactaacaaaaagtgagccactcaaaataaagatgaaatatactgaggaattatttggaaggatataaacatacttctcccaggaagtattttaggtaattgagaattaaatgtagatacgcatgtccatagtcaattaaagagaagaaatcccaatatgttagatctcattgtctcacaaaataagaagcaaatgagcgtatctatatcactctttcttgtcatggtgatctggacactgaaagtcaatattttttcttctagaagttacctgtggttacataacatatagggttttgtctgtagttttgcaaaaatataagatgaccatgtcttgaacaactctcattaaaatgtgtatagttaaaaatttctaatcatatctcactggacctttttcttgtgggaaaagaaaaagctagaatgcactataacttcatcttccaagaggatacaagcacagaatatagagggcctcacacagtgtaacaaataagcaggtcttgcagatagctttttctctggtgtcagacatacctggggacaagcctttcagctgctctgtccctagagtttacccatcaccagagtcttgttcacagtaggcctttaagaaatagttgttaaataaatgggtcttatttttagtctaagtaggatgtctgttgctttaatctattctcttctctcttcctcaaaatacgacgtttttgcatttcctcctccatctctggtagttccttctgcttccactgcagactcaccttccaccttcccatgcctggcttttgtgtcttcttcacactctagttttcttaaagacatacctcaccacattcaagtcccaaagtgacaggggtatgaagacacgggttgggtgcctctatctccaacctcccttcgagcttcacctgccagtgtcaccttctttcgcactttgaatcagtatatgcaactcatccacctcctatgtccttaggctccatgaatagctacaccatttgtcaactttcatggcagaaatgttggagcaacccttgacgaacctccttccgcacgcctctgcaccatatctatcaccaatttctggagatgcagcctcctaaataacattcagtttatccagtcctcctacccttccccttcaccctggcccaggctgtcatcacttctggtctgccagtctctgatttctacacaatccagatgctgatgtgcatgcttctcccagtgccacctttctggcctcttctgatttccagcatctctggttccagattcgtgcccctaggctgttcatccagctcctgtactcgccctactctctgctgtccaaggagatttgcaaatgttgctgggggcttagaaaatctgcttctctcttccactcacggagttaacttatcctttcattttcagctcagaatcacattctctcaacagaattcactgacttttctatctaggccaaactatgacacatgaattctcacggctctaatttctgtccttatgtaatgcacacttccttcagtcgagcacagtcaccgtaagggcaggtgcaccactagttacttctctcccttgcatcctaagtgcccagcacagtgcggccacatggcaagtcttaataaatatatttgaatgaattaatgattcaccatactatttgaaagtaaagaatgccgatgttcaacaaattaaactattgtcaaaaggagattacacagagttgaagcaattcaacttattattttgggcaacagtataccctcgtcagtattacacagcaattgcatgttcaaagtgtcatctgggctaagaaagattttcttaaaccaaaagttagtatagatcaacctcttttattttgtagaaacaactatatttcagacgcttcctcaaaagttgtctttttaacctctagaaaacaaaactacattgttaagtttgtgataattttttattccgcttgtgtcatctgaacacaaaatttcaggtataatggtattagaagtgtagttatctatagaagactattgcagttaggatttctacacttgaaagcagctcattgcttcttccattattcaagttttcatagaatttaatacatagttgagaattatttcaaaacaaagctacatcaattatgtttttccatctttgtgagcttaaaattacctctgtaagaattcatatgatctccccaccaaaaaagtgaaagaaaatgtcagatgtttctttacgtttccggacacttctattagcctttgtccccatacttcatttttaatttaaaactagaaagtttgcaaggctctttgtagctttaaaaaatccaactggcagtatgcatactagcatattagcatagagcatagaggatgctgaatcatattagcatagaggacggtaagtaaatgatagggagaggtgccttccttggagggaggcacaattgtgattacatattctcaaagaaataagataaatctgagtgagtagcatcatgatgatgacatatatatacacttcccaccagccaaaaggacacttccatttaccctaaatacgttaaaaagattgtcagtcagatattgatcttcacaaccagaggtcaaataccaaagacataatgtcaacctcaaacatcatttaagaggctgtaaggaaatgcagctatgatgcaaacatactgtggctttggctatatggacttacattaaagaatatatatgtgtatatttgttgattttcatcttttcttccaaataactatatatcaatgaagtttgttaaaaagaaaaatgcctgtcaacccagctttttgggagaacaagatggaaggatcacttgaagccaagagtttgaaactcacctgggcaacttagcaagactccatccattaaaaagacaaaacatctcgctctatctattaaaaaaaaaaaaaaatcctggcatgatggcacacgcctctagtcccagccactcaggagactgaggcagaaggattgattgagcccaggagttgaagactgcagtgacccatgattgtgccacttagcaacagaacaagaacccatctctaaagaggagaaaaaaaaaaaagaaaggaaactactctataatcttttcaggaataaatgaaaaatataatgtagtttgcaaagcaaatgtcaactttacatcaaattttacatgaaacattcaagacattttcttcttagaattagaaaatattatgctgtggctaataacatcctttgaccattgtaatattttgattatctatttaactctttataacttttatggcatatactttaatcatttacttttgaataggtgatatacgcacatgatacaaaattctacatatatcaaaatatataaatggaaaatgtgtctccctctggcctctgtagcttatctgcccaggcagtaaacacagttaccaggttcatgtgtatccttttcacaaaatatacatacatacacatatttttatttttatcatttatgttttttctatacatacatatgtactgcatgtatatttttacacaagcaatatgcaacctaaacttatttagcacatttcattttatatataataataaactttgaatactaaactaaataataataaataaatgataaataatattaataataaataaataaataaataaataaataataaactaaataataaactttgaatactgtcatgtattagatatacgcagccatacactgttccactgatatgaacttacctttgctctatctttgtactcttatttaatcttgaacagtttgtaatgcaatcttcccacaggaacatttgttatttagttttaaaacagtgcttctctctgaccaaccctgcacttacagccagacttagtgtgtcatcttcattccctggagtgaattacagctgacctttctgatttccatttagcaattgctttatggataaaattaccatctttgataagtagctcttaaatatacccctgtggttttaattcaggaagcttcatgtctttaaaacgaagtccaagcagttgagtgactttttttacccttgagaatgataccgtgctaaggcatacaccaattgtacaaatgtatatcgttaatgttttatgagctatgttgtttaaaactgcaaaaaatactgaaacaggagatatatttagcagcatgtggtctctctggtggcaatttaaaatacctgtaaatgtcaacttgttacatgataaaacattatgaagtaaacttggattagaaactcctttctttgaagcaagttattcaggactaaatgtttataccaaaggttgtaataaggtcccacaactctaaagagcaacacagatgaagcagtcagagctccacaatggaaaggtgagaggagaaggacctggagtcttcttagcagcaggacctactgttagcctggctcttcaaactcaaatggccaagaagtacttcccatcccttgatttaaccacatcagctgcatggatgccttcaacgccgataatgcatttattgacattgaagactatatttccttgagcctattacggaatttgctattataatttaaataaatcttctcataaagtgtaaaatcatatggcttcattttgtatttatttcttttattttaatactttttttggaggactggcattagtgtaagatttgagaaaggacttaccatggaaaagaaccaggataggataggctcgaattccaatgtatgttagaatcatttctggagtcagaggaagtcagggcaggtgttctaccttcttcaaatctctgaactctggtcataacatgatgaccaaccatcacctaaaattaggcatcatagaaagctccaattcctcattattccttaactgtggattttaggaacaatgaaagtacagtaaatgtatttcccattaaaaaatcaataatttattacatctatgagtatttatgcctacagcatgcaagaaggttgggttttaaatttctctttcacagtagtcaggcaaagaacaaacaacttatatctcacaaataaaactagctatttgaagaggtaagagacatgttcaaagtcaaacagctggtagggctcaatcgtcctgactcagagcctactaccctttccaggtcctacactgccctctctgtggacacatggagccacagaatatcattaaacacatatagtgaatatcattaagcacatatatgagtgagccagggagcgcccaaccatccaagtcaaccagaagttcaagagtgttgtgagcctgtccttgttaagtactggggaaaactaaaatggaagaaagtaacacaggtaaatgtgatcttaaagcaaaattaaaaaaacaaaaacacctttaatatgtaaaaacttcagcagttattttggacagttataataacatgaaacagaaagtctggcatgaagatccctatcagcaatgatctgtaaattactacctttcgggactgtattcatttattttccaatgaaaaagagcctgcaagcacttctgtagaatactgtccagggcctctttgggacaagggaccatgccgccgcttcaaccaacatagtacaatttgcaaaggtattactcactctaaggtagtgtgacagtagaaattaaaaatagctgggaccttctgaagctctcaaacatttctctgccagcataggatcgttccctgtggtgtatttttagtgctctatatactcaacttttaaatgtcataaggaatgaaatcctgggagtactattcgaacacatctctgaaaaaaaaagttatatttgatatctcatctgtgattttcatacaggcattatctctcctccaagtaacacattaaccagctattttcagtcatttgctgaagtttagggtgcccagagtctaatggataactcgctgtgtcaagtaatatcataaaggctaccatttcttctcattagactcttagatagatttataaaatatatatatttacacagtgtatatttatagatttataaaatacatatacatgtacacatagtaaaagactctcactttctgctttaggcattctaaaacaggacacacattatttccatctattccctatcatcactaactctctaaagaaaaagaaatcggtcagacacagtggctcacatctgtaatcccagcactttgggaggccaaggtgggcccatcacgaggtcatgagatcgaggccatcctggctaacacggtgaaaccccgtctctactaaaactacaaaaaaattagccgggcgtggtggcgggcgcctgtagtcccagctcctcgggaggctgaggcaggagaatggcgtgaaaccgggaggcggagcttgcagtgagccgagattgtgccactgcactccagcctgggccacagagcgagactccatctcaaaaaaaaaaaaaaagaaaaaaagaaaaagtaaaaaagaaatcttactatccttaaaattattattctcacatctaattgcctttctcagagccactctttcctttcaccagtcccagtttcccaaacccccattcattcttcctgccttcaaatactttcggcaacaccacttttggcaggaagtctgatccgataaattaaaatagaaagcatattaaaaaatatactgtaagaaactttcagaccctctcacctctggagctgaccaataatcaaattatccttgtatgatatatggtaggtttctagatgctacctgcactcttcgcttcaaaggaagtttcctgtgagaacccttgagtctagaaaatcaccctttcactagcagaagaaactatttgctgtctaaattctgaagatgacacttcctgaactcttttccaagtaaatattaacaaaacaaatacattattcagttaacactctttatatgctttattaagtattattttcctttaaaacacattcttgcatacaacttatgttattgtgggtagaacactgagttgtcaaagggatgaatagaggtggtctggccccagcaacttaaaggaccaaggactgtgttcattaagttttttgtagcaaaggaatacatcctcttacatgatttcacacactttgtttttcagtttttattctaaatattttaaataagtttgtcttttcaaggtagctattacattttgagttgcttttttttcccccactttgtcgaccaggttgaagtgcagtggcacaatctcagctgtgcaacctccaactccggggttcaagcaattctcctgcctcagtctcccgagtagctgggactacaggcgcatgccaccatgtccagctaatttttgtattttttttagtagagacggggtttcaccatgctggccaggttggtctccaactcttgacctcgtgatctgcctgcctcggcctcccatagtgctgagattacaggcgtgagccgctgcccccggccttgagtttcttttttcaaagtacctttagtttcacaatgtgagtaaatgtggaaactgactatattagtaggtattttcctattagtctttcctaaatgacttgcctactaaatatagcacaattgtacttattcaagacttaattcatctatatgtcttaaagtgccatcataatgtttgcattcaacataacagtgagagaatgttctattttctgtttggtatgtaacaagccacagttaagataattgctgctttctgtgtgtgcaagagttagggaataatgatgaaatattcttacttaaatcactttccctgtccttctattttttccacaacttttactctctttgaaatcttcctagtgaaaagctacttctctacttttaagaataaattattctccattttgtgatgtaccttctgcattgatttctactataaaagccaaaagaactctctcgctattaaccttcagacaaaacggcaaaaagcttgggctcctaaatgagaaggtcccttgttaaaatccctcaagtatgaattactgcaaataggacattgggcaaaatacataaatatcctaaacctcagcatctgtacctttaaaataaatataaaaatcctaaactcataacatcttactagaattaaatggaaaaaaaatttaaattatttttggtttgtgtttctttttgttgttgttttattggttttttgagacaggttttcactctgttacccaagctgaagtgcagtggcaaaaacatggctcactgcagcctcaattttccaggctctaatgatcctcctagtcaactactagagtagctgggaccacaggcacatgccactatccccggcaattttttttttttttcattttttgtagagatggggtcttgctttgtttcccaggctgctccgaaacccctgggctcaagcaatcctctttcctcagcctcgcaaagtgctgggattacagacaatagccatctcactttggccattgtttattaattatatcctgcagccataacaaaaaattgtgtttctttttgtgagttaaaatcatttgatagaaaataaaagtaaggttatgactcagatataggcatagatattctaatacaccatctgggaattattacttttaaaataattacttttcttctgtggaatgtacaatagttttccattaatttaaggtggttttctttctccatggaagtcgtctatgtccttcacttttgcagtataattttgctgggtacagaattctaggtagttgtatttttcctttcaaaactttaaatattttgctccattctcttcttgtttgcagtttctgataagaaatttgctgcagtgtttatacttgctattctgtagggtaaagtattccttcctgaattctttcaaggtttcctttatctctggttttgtgcagtatgcatatgatataggtaggtgtagataatttgggatttataattcttgatgttctctgaccttcttggttctgtagtttagtgtctatcattaattttggaaagctcccagtatattcctcaaatctatctttctctgctctccttttcttcttttagtattccaatgaattttacggtgtaccttttgaaaccattccatagttcttggatgttctcttctgttttttttctttgttttgtgtttcttttttctcttttcatttcaatgtagagagtttttattcaacagcagtcaagctccgagtcttttctaggctatattcagtctagcaatgagtccaccagactcttttctaggctgtattcagtctagcaatgagtccatcagaggtattcttcatttctgtcaccatgttattttctagtaattcattttgatgcttagagttttcatgtttctgcttgcatagcttatctgctcttacatgttgtctacttttcccattagcactctaagcatactaatcatactcacttaaaatatctgataaatcataattgttctaaattccctgactggcaatgtcaacatatctctcaaatctcagtcattccactgcattgcctcttccgaacgtgttttccttgcctttagcatgccccgtgctttttctcgttttctttttggtaaaaggctgacatgtattggttaataaaaaatgtgataagcaggactttagcatgaagatttgtgttaatcggactaggagttggattatgtttaatgcttgctgtaggtgtaggtgtcagaggatttgattttcttctcagagaggactgtccctggcagggccttctgctgtaatccactcttataatgcaggaggcctgttgctgtggtagtgagggatggtagagtgttttataaccttcctactagctgtgagtcttttagtgatcctgtgtttcagggctatgacttttctgagaattttcccagcaaaatacctccttttacctccttgccttctactacttttccagttatagaaatcccattttatttccttgaagccatgacacccactaagtatgaattttccactagcaagacaggaaggctaaaggggtctgtctgacatggaagtaacacccttccctgataaccttctagcagagatttttccctaaagagaaagccttcctgatgtagaaggatctaggatacttcacaatgtccatttttccttgacctgccagaggtaagaagggatattcctggaattttcaccgtgagcacttcatggggttcctagaagtaaaggcaatgagtgtaggggcctcctaagactgcacacccccggattttctccttctcacaccactgcttccagcagctcatgaaagtgaccatttaagtgatctcacctgtatatagctcctatagtctctgatccatgtacatttgttttggttgtgactctgtggacccacctgtccttcatttccaggtggcaatttaactgcaacctcagttctctgatgggttcagagaagtcattgatttggggtttgcccagctttttcttcttatgaggatgggagtgagccctttacacgactagctgaaactgaagtcttgtggatgattttactatattatttatcttttctaaactttatcaatgattgaaatgtttcagcatatatgaataaccaatagcatgtcagattcttaactcccactttctgtaactcacaaaaccagactttacttaggactgaatcttaattattgtctaaatttttatatcagttttaatgttataatgttgcagaacatatatttcaaattgtgtttcattatacacatacacacacttgttatactggactaaattattattcatcttgggaaatgtgactatttacacttccattgtattatctcatcacagtgaacagtcaacgcatatatcttgatttatacaactttataagctttttctgtcaatgttgatgatgtatcttagtcaattttggctgctataaaaaatactataaactggattgcttataaacaatagaaatttatttttcacattctggaggctgagaagtccaggatcaagttattagcgggtttgtcctctgatgcagggtcttgcctggtttctagaaggcaccttcccgctgtgttttcccatggtaaaaacgacaaggaatctctgaagcttttttatagacgctaattccattcatgaaagctccctcctcataacctaatcacttcccaaagtctgctcctccaaatattaccattttggggattagattttaacatattaattttgaagggggcacaaacattcagtcatagaaatgtgttttaagatattctttgtaagtgttaaaaaataataaagcacataattatatattgtctcaccccaacaaggaccttataaggtgggaaaatatagtcatccaattgataaatgtcattagatagtcatcaaactgatatggtttggctgtgtccccacccaaatctcatcttgaattcccatgtgttgtgaaagggacccagtgggaggtaattgaatcatggggtcaggtctctcccatgctgttctcacctagtgaataagcctcaggagacctgatggttccataagggggaatttccctacaaaaactctctctttgcctgctgccatccatgtaagatgtgacttgctcctccttgccttccaccacgattgtgaggcctccccagccatgtggaactgtaagtccattaaacctctttcttttgtaaattctccagtcttgggtatgtctttatcagcagtgtgaaaatggactaataccaatgcacattaaagattttggcttttcctcaaattctgtctgctccatcagtttcaaatgacctttgtccaccagtcgtaatttctgcctatacatactggataaagtgtttcatcaggtgctgagagaataacttaaccaatatgcagatgaaagacaattatttttgaaaatcactggggaaaagtctgttggtctttctctagatttgttaggtaattcccttgacctctgacacagcatatttttccaggtcccatgaatacacttttccataggatgtgattaaggtgtgggtctatacctcaatgtcattaacattccttaataattttccttaatcccaagtcagggccaaactttactgctaatacctgccctctacctgcatccagggatctcagagctctcctgacagaagcgtttaacttcctgtgaggaaatgttcatataatttacacactaaataactacttcgaagtctgcataaatagactgaaataagtttttataaccacccagaaactgaatcaactctagcaagggactggtaaatcacgttggtttcttcttgggcttccaacatagaagccgccagatcaatcacttctagattggagttgctcattaaacttcacggtgttttctcatttctctccaaataaatttgacaattcctctctgaggcttctgagaagctcatcagaaaaattactagacaggtattttgtggcaacatattttagcttgtactattttaagccccacccagaaagttcagtttaataatttctccacaagaagtacgtactcttttggtctttcttctgtaacctttattaaaggaaaaaaagaagaaaaagaaaaagaaaaaacctaaatcccagttctttccaatttcagatcctgtacttttctagtgctcaacatagcttcaaaaaaaaaaaaaaaaaaagaaagaaagaaaagaaaagaacggaaaagaaaaagacaatgcataaaattagaaaagtcctcttactgagctaggtggagacctgcttccagagctaccactgaaattattggcaagaacatgcgaaggcagtagattgtactaaaatgacgtggacagaaacagaatctaataaaagaagagggaagaatttcttacattaagaaatcattttctgcttttttttttttttttcttttcacaggaaaacttgctgtggggttgtctagatcaatgccattgcagaaaggctggacaaggattgaaggtgaaaacgggaggagagcatttctagaaaactctttccatacaaagtgccagaggcttcatgccagatgccccataagctcgtctcaatcccacctttagtgacttcactggggtagtctgaaatgaacactctcaaaagcctgccttcctattttagctcaagtttgtttggcttcctttgtaaatacctgtgacatgtaggtcaggaaccaaagagtttagcactttcatttatttctgtttttggtctaagggaaacagaataaccaccagtgactttctattagtttgaaattttggaggccaaatgacataaaatgacatacagcaccagctattttttttggagggggggcacagagtcttgctctgtctcctagactagagtgcagtggtgcaaccttggcttactacaacctccacctcctgggttcaagtaattctactgcctcagcttcccaagtagctgggactacaggcacccaccacctcacccagctaatttgttttgtatttttagtagagatggggttttaccgtgttggccaggatagtctcgaactcctgacctcaagtgatccacctgcctcggcctcccaaactgctgggattacaggggtgagcccccacaagtggccagcaccagctgctttaaaaaaaatcgtgagggatcacagatcaaagcagagtccaccactcagaacaggcacaggacagtgggtcttgcaaagattaggttggtgcaaacctagtagcgttgctgttaggtacatcccaaactccgtcacgcaacacaagttgtttctcttctttcctgccacaggtttgtggattctattgctatcctcatttggtgttataattacttgcaataattgtttacagcctcacctctgtcccttaaaatgtttctggcgggggaccattgctttttcttgattgttttcctaattcctagtaaagtgcttggacactcagtgaatatttcttcactgaatgctattaatggccattgtccatcagcatcaaatagagaatgaaaactacccccatatgtcttattttaaacagaagccctgccctcaaagagctctacaggggaacgccaccaacatatgcgtccacagctcatttaataatgctcccatccatatgttttgcagtaggtgttgctggaccaagactgagttctgcgtcaaccagatgtactgtgcagattagaattccatcttcatgcttttcctgactacaattaatcttaggaagaaccattgacaaatctgcaagcgagggagttgtccatgtgttaccagaattagggagtcactgccaaattgcacgccaaccttcccaccagactctttggggcttcataaccagaagagcttctccagccagcagctgttaagggatattattgtttggatggaacccgattactgtgcatccttcttaattaatgcgattaccaaaggaatgtatacaaaatagggctctaattaattgtagccaattaagattttaaactataaattctgtgattatttcacatataaggtgtgatgctgcagtttcttaaagacatttcctgaagaaacaaatcttagtacgatacctaaattactcagagaggaagattttacatttatggatgattgatttgtgttgagctccctacacagtttctttctgaaaagtgcatataaagttaaagaaacaaaagcacggagtcatgagactctatagtattacaggtgcaatcatttctgttacaaagctatggaattatgcaagtgagtgtgcagaggaaatagaaacatttcactttaaaaattggaagatagggccgggtgcggtggctcacacctgtaatcccaacactttgggagactgaggcaggcagatcacgaggtcaggagatcgagaccatcctggctaacacggtgaaactccgtctccactaaaaaatacaaaaaaattaaccgggtgaggtggcgggcccctgtagtcccagctactcgggaggctgaggcaggagaatggcgtgaacctgggatgcggagtttgcagtgagctgagatcgcgccactgcactccagcctgggagacagcgagactccatctcccaaaaagaaaaaaaaaaaaaaaaaaaatagaagatagaaatataacggtcgcctttaacttctgcaagttttgtagcagatcctctgtttggacactaatccgtgaaaatgaactcggaaaaggaaattagtaataaacatgagacgttttcacacttaagaggctaatgtgttttctcagtttacgtcactacctgcatgagttcccatgtaaccacaatgtaagacaaagctgtggcagaggcctgtggacatcagggagtttcacctactgctatttcaccttcacctcctgaactcacaagaaagacatggggtattcccaagtcacagaaaacaggaacagaacatttatccaaagaaaatgatgatgatgatgaaacgcattccgtttcatgtgaaattaccaggcaatagctaccgtatttaattcaattcatattagatatgagaaactgcacgtgtggagggaatagaaattgaattaaatacactcggtttctcagatgtaatatggtcaggccgagtcaagtgttaccaactgtggttgccgaacgaagaaaatggaatacgcatgcttatgattatatatataagagaaatgcatatatacacatacatatacctgtgtatttatacataacatatatataaaatatgtataacaagaaaaatctaacacaaatactccaattcataggcataacacccctcccaaaagcagactttcccgtgtggatttattgcaatggtaaaaagctaactcttgctaaagtagattacatatagtctgacaatcgtagattctgatccgtattttagataagaaattgtttacactgtgttgtcgagtatagattggaaaccacatatctgcgtacaatcttcctttcctcagaaccaacatatatttatttttcttgggtttccatacaaaaagcaggcctggcaggagcacggctctgaggtgtcatggacctgcgtctgcagtagagggcaggagcagggacagctgggggactgttgcatccgattgaactctgggctagcagttcccaaccttcacacccagacctcggacgagggaacgttagcgcccggcggcagtggatttcgggagagggtcacgccctaaacattatgtccgggtttggagacagacatccatttggattttcctggcggggattcaaacttttagcagagacacttgatgcatagaatacttggcatcttggccacacggagacccatctgtcacaatggcatcctgcctatttcaaagttgcttagatcttttcagcaagccataagtgccaggcaggagtggctcttcatggggagtgggtataaaactgcaagtggcatctcttccacaggaacatcttctcttccgctagttcccatccctggtccagcttgcaagagctacacctgttgcccctcgttcatagaatacactagatttgccctggaaaggcaacgccagcacttcagattacgttcatatgccagaaagacaggtggtgcttcagcaggagtctgatgaagtcaggaagataactcagggcataaaaatgtttttataaaagaaagtagagtcctctccatgggagcattgtgaggcagctccgtagatgaccacaattataaaactaaatagaatttcggcacactacgatgacaagaacacggggtaatatcacatcaagaacttgctcttcacatcagcagatattgttgacaatgtttatgggcaacttttaaatatggcaaaaccctttgaaaaaagtattctggttatagattcagagtacattggaacacatatgcacatataaatatggctttcatttacatgaaatcaattgtttgtcagggaagatggttttgttcaacttgcaatgtatgttttctttcttcctcatggaaatatgaaagctaaatgcagttgtttagaatgagaaaatgcacgtggcactcaaatactgccctgctcaataaatgtaagttgaaaatatcagatcatcctacttggggaaactctgtagtaataacctccaataaaaatactttacacaaagagtctaggcatttttttacagctgattttatttaatgaattgtaaggcaccataactattgtgatatcgcaaagaataaataggtatcaaggttcatattttaacaaagtgacagctagatgctaacgtaggctttactatattaaaagtagataatgcattcaacagaatccctgagaatattttacttttgcaagaaatgacagaaaggaatcctttgtcagcattacagtttttgactggtgatggataccaacattcatgtcaacagggtgtgagacatgtcattaggcatccgcaggtgtacagggttcagtaggtgtattagctcattcttaccttgctataaataaccacctgagactgggtaatttttgaagaagagagatttaattggctcaggttcggtagactatctataggaagcacggctgtggaggcctcagtaaacttacagtcatggtggaagggaaagggaaagttggcatgtcctacttggctggagcaggaggaagacagagagaagtgggaggtgctacacactttaaaataagcagatctcctgtgaactctatcatgagacagcagtagggggatggttctaaaccattaaaaaccacccccacgatccaatcacctccaatcaggccccaccttcaacactgggcattacaattcaacatgagatttggggcagggtgcggcggctcacgcctgtaaccccagcactttgggaggccaaggtgggcagactacaaggtcaggagatcgagaccaccctggctaacacggtgaaactccatctctactaaaaatacaaaaaattagccgggcatggtggcgggtgcctgtactcccagctactcgggaagctgaagcaggagaatcgcttgaacccaggaagcggaggttgcagtgagccgagatcatgccactgcactccagcctgggcgacagagcgagactccgtctcaaaataaataaataaatgaaataaaataaaaaataaaataagagatttggatgggggcatagagacaaaccgtatcagtgggaaccctagaatgtgactatccacaaaacaaggatgccaagttcacaatacctaataataaaagccataatgtgaaaagtgttgcaagataggaacagagtgtggcagtggttcagatggaggaggagatttccaaagactgtaacatttgagatgggcctggaaggctaggtacgattcaaaacaggtcactgctcttaaggcatttacaatcagaagttgatacagaaaatatgctaaggtctatttagtagagtgagtattgttactgtctgtgataacaaagctgaaatgacagaaaaatcacttgtaaaataatactagactttgtgatgtttaaagtcttatttctctgattatgagttagcaatacttttaaaaaaagaaaatatgtattctattacaaaactgccccctgaaaaattcttcctttgaatggaatcccgtgttggtgttggtgactcctgagttgaaatcattacgaaggggatgatgctgatcgagggatcaaggacatcactcaaggccccctccatgtgcgaagcatgtgagctttctgggacagacttatttttgtatttatgagcttcgaaaatcacaaagtgtattgccttctctctcttttctttttgctggaaatctcagagtgaaaggtgggtgttcctcccagattcagacctttctgccgattcttgcacaatatcctcctcttgtccttctgtatatccacctggacttcattacccattttctaactttctgcacaatgtgtatgtctgctccaatatttattagaaaaaggacagggatataaatgtgaaaaaaaaagccaatttccaatgtctagacaagcactgcgagttgtgctttaaaaagacacaaagctgaaaagtgatagctgaatcacgttacttcagattgataaatcttttctttcttgacccaatctcactatttcagtgaaataaacttattatttgactaatacatttttcgtaatttcaccaagaactttccagtaattaatttccacacatatatgcaggtatgtgcatatggaattttaaataatttatatataaacacacttgtgaatatgtatgtttgtacatatatgcagatatatattgttcatataatcaccacacacacacacccctacaacatgtaattttaaataagtgagttttaaaaaaagtagtaaaattctggggggtgtatgtatgtttggtttatatttttttcctttgctattacgattgagttgtttgggcacctaaaatacatgtaccaaaagataagccacttaggtgcagggacgaatgtaacagagccatggttttcagtgaggtagtagtttgttaaacagagaaaataatgattatgtaacatgtcatgccttacttctataaagttagaatggaaacatactcagttaaaatcactaaagtaaaattaaaatcctgtaaaactgaaacgtacttgaaattaaaacactttgtaatttagtcatagctacaattcagaaataatctcttgcccaaagggaaaaagaagagttctgtcaattagagtatatttagaaccacgggttagatgtaaatgttaaattcttccttactatgaaactttgctggtacttaaaatttagcataaacaaataatctaataaattttattcattagaaatatgaccaaaatttccaatataataacaaaaattaagggggatttaatgtatattttctattagccattccctggctatttgaagcatgttatcggtcattttgatagaaggcagaagtttgcattagttccagatctttcataaaatgttgacataaaataaaatgattcaatacccagtactcagtacactaaatgtagtaacaatttgtaccataatatgaaaagttttaatatcgatactccagtacattgtactactaattaacataggaggtgtgaatctgtcccctctaaaatctgggtgttgccaatgtgatagtattggaagctgggcctagaataagtgattagcctgtgatggctgctcttttgtgattacagtaggtccccccattataaaagggcatgacccagagttcatccccttttgccctttcaccttctttcatgtgaagggagagcattccttccctccagagggtgcagcaacaaggtattctcttggaagcagagaacagccctcaacagacaccagacctgccaatgccttgatcttggacttcccagcctccagaaccatgagaaatacatttctgttctctatcagttagtcccaggtattttgctgcagtagcacaaaagagctaagacagtagaggaaaataaaatgaaaagacaaatagaagacaatgttgagatcaatcaaggtaggttatcatgaaaattcctaccttgtatatataatatttgtaatgttgagtcaatgccttttctaagagtcttatgctaatgaaccaaacaggacaggatcttcacccccaaatctactcagacttattctagaaagtattatacttatgactggctgaaatgagcgatccaaggcagttcaagataagtcaatttcttgagtctacacataggaaaattagaatattaataacaaagtatttagagagaaaatgcatatggaaatgctggcagtataaatctagggaattcactcatatcttgaaaatccgtttaatgacattagttttgaaaacaaaagtatatgtctgcagcaagatcatttttctcaggaatcaaggatttagttactggggacctgtcctcagaaattacaatggtgaggccaggcacagtggctcatgcctgtaatcccagcactttgggaggctgaggcaggtggatcacctgaagtcaggagtttgagaccagcctgacctacatggtgaaaccctgtatttagtaaataccaaaaaaatagccatgcgtgggtggtgcatgtctgcaatcccagctacttagaaggctaaggcaggagaatcacttgaacccaggaggcagaggttgcaccaagccaagattgtgccattgcggtccagcctgggcaacaagagcaaaactctgtcaaagaaaagaaaaagagaacgaaagaaaagaaaagaaaagaaaagaaaagaaaagaaaagaaaagaaaagaaaagaaaagaaaagaaaagaaaagaaaagaaaagaaagagagaaagaaagaaagaaagaaagaaagaaagaaagaaagaaagaaagaaacaaagaaagaaagaaaagaaagaaagaaagaaaagaaagaaaggaagaaagaaaggaaggaagaaagaaaagagaaagaaaagaaagagaaagaaaaagaaagaaagaaaaagaaaaaagaagaaagaaagaaagaaaagaaaagaaagtaaaagaaagaaagaaattatgatgattatgatggtgatttagggtcagaaacaggcaatttcaagtgacttgttagctccctctcacgttccattcagaaacctcttccaccagccagaggcaacatttattgtcagccaatctgagtgggggtgctaaacacatttcacatttaggatatactcaggaaaattcaaattccattataaattatgttttaatcttcctaagctatctcaaaaattatcattatttaatatgaaacatgtataatgtgaattaatgggagtttatatttttaagatcatgttaaagataagaatgtctttatactgtcccctgaaaacacagtattctctgtatgtaagtttgtgatgttggaatcactatatagttggtaaaatggcactttaaactgtgaacatagaaattcagatgcttattaacatacaatgcatattttccaaaataccttttattttactcagataatggaaggataaccaacaagtgtgaattacccacagaagtgatgggtgtgtgtgtgtcggtctctgtgtacaggaatgtgtatgcaatgtttactcaccctaagacaaaatgtgttccttgttgttctgagtaattattcttctccaccagccatttttttcttatatgttgttttcacagatcatggcgagaggactttataaaagttcaagggaacgttactcaatctgagagaaaacccaagagtgactgtattcactcagaattgaaccttccatgcaagaagccacctccagccttctgaacgtaccctcacatctgtttggaatacttgccctcttcactcagccaaatttgcttcagatccaatcctgcaatttccttcctatgaaaagcctttcaagaatcccccagcatggataaactgccctcttcacttgtacccagagcacctgagcttttgtaatcatgatccaggaagtcactctggtgagattacccattgccttgcaggtatctcccaccagagtaaattctagaaggggtgaagtactgcctgtgtgtgcgagtgtgtgcgtgcatgtctgtctgtgtttttttaatgtaccttcagttctaatggcagatgatacgtacactgaatgtgttgtttaaaggtataaataggcatcattgattcttgttacataacctatccctgtcccaccccatctcaaactagcacttctaattatgtatgcttatatatagcacaatattttacaaaatcctgttttacttgagaaaaattagaaattaaaggtcaaatgatatttagcaataagaacttctaataacttgatattatcacttttatgtattcttcctaccttaaaatttgactcgttttacattgctgggcaaaccattcacaccctttcagtttttaagtgcacatattacatttgttttctataaaagctattgatagcgctcatgagagaaggtatgcagataacaagaaacaacacatcttgtccacagttcacatggtgcagcctgggaaatttctgagagcccctgcagaccttcagatgacagaccagcccattatatgcattctgtgttctcacgcccctagattgccagaggtgtaaagaaggctactgaaggacaccaaagtcaccccaagaagtgtttccttctacacagggaaatgacttgaggaattcctttaccaagtttttcctagtgctaaagttttaactggcatcttctctaagcctcaaaagagtctctcactcccttaaatcttcttattcctagtcttggtgtatatgcatattacacactttccatcacagaaatactcacattaatgtgaacagtaacagtccctagcatccacctcagctagatggggtgctactactcaggcataactccaagaattttccaacttaggggaacaatcttaaaaaatgatttgaaataaagggatatcaattatactagcatggaattaggggaaatatttttaaaatatataataccatcaatttttcagttttagatgaccactgtcattttctttcaatagttacataatagtagacacaagtgtccattcattaaacagctgtcctttcttctacccttcacacttgactcactcatgcctcatcctcaaaggcaatgtgagttgatgctttcgtattggttaggagcatgaacagttaacttcttaaagggttggcatacattttaaaataaagagtgtaactggattgtttgatactcaaaggataaatgttggaggggatggatatacattctccatggtgtgcttatttcatattacatgcctgtgtcaaaacatcttatgtactttctctctaaatataaataaacacacatatatattcatatatatatatactatgtgcccacataacttaaaaataaatataaaatgaagcccttgtgataacctcattgagtttaaacatacacactacacttgtattctacattgcttcctgcactcacatgttctctcctggtatacctatccacggagagcactcagtgggactatcagtgcttgggagttagcatgattacagaaatttaccaaggaaccttggaaaggtcattctattatatatctccaagattcagtgtcccaatggtagaaatataataattccaataatgagttttcaataataaatgagataatgaagaagtaactggcccacaaactataggcagtatccaaactttatctgtataggtttctttggtttgggttctatggaggaaagaaagtagcttagcaagctattctcaaccttgcatctgaatcatcctttgatagtttaagaaagttttataatagaattcatttttgtcctctgtcacatctcagcttgcttgaagtctcaatcactgtaggcagaaaagtgatgaacaagacaagtttctgccgtcatgattctgacaatgtaaatcaagcatccaggctcacaaataaacatccagacactcgatgttgaatacagatttgacaatctctgctagaaaaaaatgtaggatccactttgagttatgatcatgtaagttttattttcatctatgtgaccatgataaagttgtaaacagttttgtatcattttactaagatattttcatcccagtatcctaattatgttcatgtaaaatgaattttcctctcaagaatttgaacgttttctgttctatttttattgaattaaaaaccatctatatgatattttcaataaaagatgtaatagtaaacataagtataaaacctacagccaggcacggtggctcacgcctgtaatctcagtactttgagaggctggggcgggtagatcacctgaggtcaggagttcgagaccagcctggccaacatggcaaaacccgtctctactaaaaatacaaaaattagcctggtgtggtggcccgtgcctgtaatcccagctactcaggaggctgagacaagagaattacttgaaactgggaggtggaggttgcagtgagccgagatcgcaccattgcactctagcctgggagacaagaatgaaactccatctcaaaaaaaaaaaaaaaaaaaaaaacctacaaaaaacttttataaacattttaaaatcactcaaactttttgacatatgtatcatattgttttcatttgtcatattaagattattacagttcgggaagaaaatatgtttctcaagtttccccaaccagcacaagacaaaactgggatttgaacccaaatcttgtctcttcaaatcccgtctctttttctgtattatgcaacggaagaatctttgcatccaccatggtgtctacattgcataaatacctccaataaatatttctggaatgaatgagcaagtgacttgaattactacataccttaaatagtttgggttgttatcaagcatatttgaatatattatgacagaatgaactagcattataagtctttctgaatgtttagtccctgagcagcagacacaaggaaggacaacatcactatggttaatcagagaataaaacatggtgaataccagttttatggtttttttttttttttttttttttttgcagtgtggcccacttttggttctgggaaggggctcaagagttcaacttgaaggttaatttccagacacaagtaggtggtctttgacggggtcatgtgttgtcacatgactcctgttgaaacctgacatttctttagcagttaaatacatggcattttgtaaaacaatctaaaatatacctttcctacagaacttactgttaatcatttcaaaatcaaccataaaatatttaaaactcagtaatttctagtcttgtgttccttattctgaaacgtgggtattctgtctggcattttcttttttttttcttttttctttttttttgagacggagtctcgctctgtctcccaggctggagtgcagtggtgcagtctcggctcactgcaagctctgcctcccgggttcacgccattctcctgcctcagcctcccaagtagctgggactacaggcgcccgccaccacgcagggctaatttttttgtatttttagtagagacggggtttcaccgtgttggtcaggatggtctcaaactcctgacctcgtgatccgccctcctcggcctcccaaagtgttgggattacaggcgtgagccctcgcgcctggcctctatctggcattttgtaattgtgaaatggcattctgtcatgctcagtatgcaaaacatatcttttatttccctggtcatttgatgcatttccagccagaggtttatatttttgttttcctattacagttttagcaatgcattctttccaggttatatttaatgactacaaaagtgagagctcataaaccaacctaaataaacaaacaaatacacattttaaaagtggacttattcttttgaattgtttttattaaaagaacatattttatcaatgccgatattcatgaggctgccatatcataaattgaaaggacagccaagcctatcaagtctgaaatattcaaattgcagggtaaagaaagaggctgctattacatttattttttcttgtggacacaatgaataaatggatgtatcacagagttaaacatgaattttttttggttctaacgaaaggaagaaataaaacacctataattttgtgtaataacctttgctctgaccccaccatgaactctttatctttacgatattttctgtatttgtgagatctacgcatgtggccgtgtaattctctcacacttaatactggcgcttgcatctactagaagctttggaatttcaaaacggtgtaatttttctatgtaaatgtataaatagcagttatcttatttgtttttaattaacctccttatttaggtacagatgtgatatagccttggggaaaaaccaactcaaataataaagaaaatatggaataaaaagcatgtatatagttccttaattcttgatttccttgcaaaaaaatatgaccagtattcttctgggcttttcttttttttcggtcagttaatacaaacaaactttacaggactttacaatctatactgtgacttacattttaaattcaccaatgctttcatgtcatctctctgtattgggatgcctactgctattttgtgtttgaatatctacctagaactcctccctaaatagtttgctatcaatgaactttaagctctttccagattttttatataatgagcaaaggtaactttgttttagttaatttttaaaccatttacttggacccaagtttaaaactaaaaagcattcagctagagcacatactattttcatttataaagattcaaagcagtagacatcccgtatctaaaagacatgcttcagcattccttttaatgaaaaaaatagggctgtgttatttgctttcaatgcattattattattattattattattattattattattaagatagacactcactctgttgcaccaggctggagtgcaatggcacaatctcagctcagggcaatctccacctcccacgttcaagtgctttttggctaatttttttttatttttagtagagacagggtttcaccatcttggctaggctggtctcgaactcccgtcctcaagcgatctgccagcctcagcttcccaaagtggtaggattacaggtatgagccaccacgcccggccaaatgcattatttaatctaatcttagtataaatccctgccaaactgccccagcaactgtcagtgaggcacagtgtgaaagtttaatgtaggactcaagaactgaggcttggggctcaagtctttgctttgtagcttagctctgcgatgccagtcctttttttccgagagcaagtgagttggaaaggggcaacaactagcatgtaagagttatgccttactaaatagttcttagaggttcttcatggcatcctaaactgacgaaagacaacaggcagggcatctacattggtataattactcaggtaagtggtgatgacactgtgaactagggctaagggagtagatatgtcagatgatacttatctgcaagttaacataaataggacttggcaaatgcatttgtccatttgctcagactgaaaccttggattccaacttggctcctctccttctcacactcaccagcaaatcctccaaactctgccttcaagatatacccagaattctaccaagattccccaaagatcccaccttgtcatgtccagcagctctaacagatgaaaatcattttctaagtgttttccacactacatctccagtgattctttcagacccaagtctgtgtaaagctcccgagtcacaccccacatcctcagcggcaaaagtagaaatccttccctgatacaggatgctcaccaggcctggctcctgtggcctctctgagctccattcttagccctcatcctcagcccactttgctattccaccccagcctctgcccacgtgggacgcacacatagactttcccgttgccattggcactgcctggagtgcccgtcaccaagaagctgaccagcatgtcttgctctcttgcttccactggatctcagctcaaaccccactcatcagaacaaactgtcctgacctcccatatgtgcacaatcccctttatttttctacggaatttttgccaccatccggtatcactgtctgtggttatttagttatttactatcttctctgactatgcaagagctggggctttccctgattgtctctgatacatcgataactactaacattgttccaagtgcaccataggggctcagagatatttatgaaataattatgtgagcctgagcaagttactggccctcctgaacttcagcttcttctctctgaaataacaattctaattccagtcttgcagatgtgcacgatcatttacgaaagaggctatccacaaacgcgctgagaagtaactggctcatagtaaggggctgacaggaattcattgttactcagggttttaattcagctgaattgtgccaccctagaattcatacactgaaataataatccccagtgcctcagaataggattttatttgcacataggcccattaaagaggtaattaagttaaaatgaggcccttaggtgctggctcactcctgtaatcacaggactttgggaggctgaggtgagtggatcacctgaggttgggagttcgagaccagcctgccaacatggtgaaaccccatctcaactaaaaatataaaaaatttagccaggcaggttggtacatgcctgtaatcccagctacttggaaggctgaagcataagagtcacttgaacccgggcggcagaggttgcagtgagccgagattgcaccactgcattccagcctggggtgacaaagtgacactctatctaaacaacaacaaaaaaaggcctttaggatgggctttaattcagtcccactggtgtctttataaaaggagaagatgtggacacacagagaaagacatcagagaagctcctgcaaagggaacagagcacgaggggacacagtgagaaggcagctgtctgaaagccagcgagagaggctgcagagaaaccaaacctgcagacaccgtcgttgtggacttccagcctcccgaaccatgggcaacacatttctactctttaagccacctaccctatcacagtttgttatggcagccccagcaaggactacaattattaaaggactcctcctaaataacagatattcaagaaataggcatttctattagaagtttaattcacaaagatatatctaactatgcatagggtcgtgaaaaatgagatgctggatatttcagggaactcctgtcttgatatttcagaagcactaggtaacactcacctcagtgtagaaaggaaaaaagctagtctcaaggtgtgttcagtccatttgtctacaaatgatttcatcatttgtcaccattttcatctgattcaattaactgacacatcattctacacatctcccagaaaacttcagcttctgttttatttttattttttctggagcccgcacttgacaaatggggtgacattcaccctaagccatggttattataagccacaggagatgatggtgggagagagaattcagccacctccacaaccacattccctcactgccaaaaacatccccattggcaaatttaagtttttacaaaggcacttggcaccacagaatcagtagattctccagctattgtagtaaaagtatattgcaagagctaatttagttcctgagtgaagctacagttttctgttgtgagatcaggaattttaacattttattcacgttaagcactgatgaggtgaatgaagaaaggaacaggggtgcacggtgcagaagcaaaccccacagggccaaggaaaaagagcttgtttctcgccctagctctgtcactgtttttgtgtgaccttacatcaattgcgttgattggtttaggttctagattcatatcacataaaacgtaggcatggacagacgttctccaattccaatatgcaatcaatgtcctttcacatattaggcatctcgtgctaactaatcacacaaatattaaaacaaaatttatttcatgtaaaagtgtcatatgcaattggtgtgatattaacaccaattctgaacactgtaataatgtaattctgatttcattcataggtgcgcgcacacacacacacgcatatatatatacacatatacatgcacacatcattttgagaagtggcgcttaaagagaaatttgacatactgttagcttattagtttactcagcacagctgtgctgaaaattgttcaaaactacagccgagcatacagctgagtaagccaattccttgcagcagcatatattctttctagtttaagatcccctgctaggattggcaaggatagaacacaattacatttatcacctgtctctccaaagactggttcctaccaaacccagaaacattaatatttcctaccccaggtatcaatgtttaggtcgtttatattgtggataataccatataattgttacttttagatacaaaaggttaccaggtgctagaaagtgttaaagtacataaattaaggaaagcaatttcagctgtgaaatttacatttatttgatgtgtgaccattgtaaatacaggatagatcttaatttcttaataaagggttcccagaattactgtatgtctagttttctgtatcccaccatctaacacagtggttgacattgtacagaactggaaatttacagaagcttatggaactttgatttaaaaataaaaacagtaagacaatatatgtattatcaatgggagacatgagaaaaaggaaatctgcccttacaaatccttgacttatctgtaataattggcttggaaattcaggcaattatatagatatcttcattttccattagcctgatatgattggttttattacgttttaccttaatttgtgtcttatatgaaataaagttatttggggcagtcctaaaagattgaaatataactcactcccctttttttagaatattgttttctccttcaattttaacatttctgtgtttgacattacttttgttctctccttctgatcaggacatagttctccttctggtcgctacgaggagtaaacatcccatccctttgatattaggcataatcatgtaactcactttagctaatacttcctgagtgacactgactcgggtctttgctggctggttacctttagttgccaatttcaaacgcccagcctgcccaccgtctgtcccagcaatcatggaaacacatgttattatgttatgtatccatgaaccatccaacgcaaggtgactgccttggaggatcacccagactatagctgatttcaagaaaaaagtctggtttatagctacgttataaactagctgtgtcctgcaaccataaaacatctacctcctttggaaaaagggattagatacctatttgtgtttaagattatgtaaagcaaaactaaccaggattgaattattgagctgttcccagtaccatctcctcacataagcaatttggagagaatggctaccacagaaagggtggtgaggctcagaaagacatttgcaaacattttagcttgttaagagttttaaaatgcagtatatttttaggggattttcaaaacttcaaagtttattgattgttatatggagatatgtactttagaaatgtcccttggacattaagatgcttatgtaagaaattcttgtgtaacatgtattagttattaaaattcaggaaaaaatttaaaaccacaataatttgagagattcacatagctactaataaataaaatgcatattgctaacatttctttggtatatattaaacaatagcatgaatgcatttattaaagcaattttcatttggaatctttcaatgtttaatcacatttctgttgcttctagataaattgattacagcaatagagatagctttgctataattaaaactgtaaactttgaatttgctcccttcattttattttgggaagacttttaaatataacttctctggttttaaaaaaaagtgaattttacataaaattgtcttaaaaagtaacatttggtaccaagtaactacacacttgacatatttctagaaaaaaaaaaacactcaaagtctgatttcagaaactagaatatctacagacagagtttgttccttctgtgaggtgaagacacgaagacttccaaaatctttctgccagtttgtcttaaagagaaataatatactacctcattaaggcctatttcaattaaaatgagatataaatgaacgtattcacctagaagctaatagaaaataaagcttgtgacgtgtgctcttgtcttagaaatatgatactgcaggattttggcaaatagacccaacagggtagcaagttgacgtgtttctatgcactttcaggacaaattggtaaaggctgcaggaatgaatgacacagtaaatgccagcaacacaccatgtgctggcacagaagtgatcagccttaagtacgatccttaaaataatccaagcttacactgacttaaaggtaaatttttaaatattcaatagagttttaccccttccctgtgctccctggttcaaattttcaactacaggtcctgtcgacgcctcaaacataggaaaatgcaatattaatttttactatggcttaaaattgctgcctaatagtgaattaaattattataggtacataacatgtatctagccaaaatgcaggaattgaagatgggattataaaagaaacttacaataaacatttctctttgctgatgagttaaaagattttctttttaacttcaaggaatcaggtaatcaatagcactttcttttgcggcttgaagtaattaatcaccttacatacttgtatggatatgttctctatctggtatatgtttttcttttttacttttttttctttcttccccttcctttcttccttgctccctccctctcttctgtcttctgaatcatgttttcccactaagtatgatatgacggcactagtaaattttagaaaagcaacagcaacattctctcagaggagcacaacctgtccagctgtataatcatgcattaatatgccgtttaaatatagtatcccccattttggtaaactgtaagtgctgcttcctcctcgccatctgaccttatggggaaaaaagtcatattttgggtctttgtgtcaagataaagaaaattaatttcaaagccaacaaggagagaactgtcagtgcagaaggtaagtaaatgccagcagttgctctgtgacttcaagacagagagaaaaatactttcgaaaagtagcactttgatacatacaatactggaagttttgcaacaagcctctccggcaccaagtgcagaccccacaaccacaatgtactttccgaatgcctgtcaaataaatggatagatgaaaggaaggaaggaaggaaagataaatggatggatggaagaatggatgaatgcacagatggtggtgaaaagatatactaacttataactacaactatccttattgctttcttcctctcttccttctaaagggacctagatgtgagcccgatacatttattttgattaaaaatttgtactatagatatttacaaagatacattgaggcagagaagcatcatttcaagtagggttttcatttgttacatttttaaatttcataataggcagaatcacaatgtattcatctttgcccacacagtcactctcactcaacagttacttacgtttatgctttttttttaaaaaaaaatgaaggttttgatgatgagataaatgtgttctagcatgaatgcaaagaaggtctccatgaactgagaactttgaggcggcagccgtgagcaccagggagagacctttgacaaggaactcctggcccagtgactctgagaagaggccaggctaacaagaaacagaagaggctgcctgagctcagaagcaaagctcctccaacatttttatccagacatcccccaaggcagaaaaaaataaatatttccccacagaatgctttgggaccatccaacatacagttgtccatatcaacatcaaccttgttttgcagccctatgtattaaattcaaaattatttgtatagatatgaaaatattgttttatgaagccatcaagaataataattcaggaaggcattctatcatttcatgtagttttgcaaacctctagcttgtattcacatcaacactccactgagttatagaaaatacgaagagcttatcagagagagcttccggggctttgagctgacttaagttgctactaggaacgagatggagactgcaacatggacaaagaaaggacacaggcccaatataatgtctacctttttatttttcacttatctacctatctatatatcatgtatttattgatcaattattgacctatcatctatgatccatctacttataatctataatctatcaatcagttttcatccatctatatatctataaactatctatatctatctacctacctatactataggtatcatctatcaatcatctattatctataaacctacctatcatgtatcaatcacctatcatccatctatcaatcaatcaatcatctaactatactacatcaatcatgtctatctgtatctatcatctacctataatgtatcaatcagcaatcatccatcaatcatctatttaaatccatctacctgcctatatctatcatctatcaatcatctgtctatattcatcatctatctatacatatctatctagaacttaaggatttctatatacacacttatgcagataaacttaaaatcccatatcacaacaggccccatgatcaggattctgccttcattccttatagctcaccactttcaatatgtgtatcagtcacaggtgaggattttaaattccccagatgggccatgctgtttcacagctctgccttcccatatgtggtccctggatccagagttcttcctgccccacacctttcttcttcagttagatatcctcaacctgaaattgttccccatgactgagctcaggcagaggtctcattaggaaatgcccctgcgccctctgggtggagacatcgccctgtgtgtatccttacctcctgcacatgcacctcaaaagccctattactctgtgttgaagttaccggttcatttctaatgcttgcagaagactaacagttaccagaaatcagaaactaagtctttcagtgtgaatccattaagccatgtgtttcatgaatgaacgaatgaatgaatacaactctataaggttatacacttttttctgaatttcaatattttcagcaaaaagtctataagcctattttcatttgctctcattctccaaaatgtggattcactctctctcgatgatatcaccattgtaactaaagaaacgagttttacatatttttagttcttgttaggattgaggaatggcgtgcaggcattttgatagaagaaaataaaatctgagaagttcttctgtgattagaaagaaagacgaggaatacaagaataggaattgcaacttgagagagtgctcggcctgctgtttaccaaaagcagattcaaacgtcttcacatgagaagcagaactcatgcaatttctgggctgtcttcctccccagcaggatgctcctggatgccacgctgccgctcagaacagttagtacttacactgccttttcagcagcttcatggaagaatcagcaaaaacagccaggaataataggaacccaaagtgcaatgcattagggagtgaagacttaatcaaagaaacagcaaagggaaattgaaatcatcataggcaaggagtggaggtaattacagttataaaaatggtttctgtcctgttccacataatctttcttgctacatctagatcctgaaaatcacattaagttgagaggcagaaattattatgcttccatataataaagattagttaaaatgtgcccacagatattatatcatcagataacagatgttttatctttgaaatttcaattttaaaatgtgtgcatgggattgtgaataaacaaacagggacaggaaaaaactgaaatagtaaatcggcctggttaaggtttttagagtgggcagcagtataatttttaaaattgaagatgtactcaaattgatataaatagaaaaaaatagaaggatttttgtccagaacatcttattatttcaaggctttaaaactttgcccaccttttccaattacacttctattggatggattgtaccttcgtgaataaatgtttggaggtagaaattcataagcattttaagtagacctacctgtgaaacactttatttgatatatttgtcaacactaaattacctggggatgcattttaattcaagagctagttatggacattattaaccattgtctatgactagtaaatatttcactgtaattcattaaacatcaatgttaataggcaggacctgataaaacccatattggaattgtctatatgtgttgtccctaaaacacactcaaataaaatatattaaatggattttataacagctttgctgctaaataaaaataatacataaaacactattattttgactaggttttttgttcaaattattattttctcttgtgttttattttctttaaatgttatttttgttgtcggctctggtggctcatacctataaccctagcaccttagcaggccaaggctggaggataccttgaggtcaggaattggagaccagcctggccaaaataacaggactctgtctgtatgaacaattaaaaataattagccaggcattgtggcacacacctgtagtcccagctatccaggaggctgaaggtggaggactgcttgggcccaggagctcaaggctgcagtgagctctgatcctgagactgcattacagcctgagcaacagagccaggccctgtctcaaaataaataaataaataaaattattttttataaatataaggacaaatctggtggtatagtcctatcttcactgggggataccatattcatggactctacaagttactttccactgtttgtttttgtaaaatagtgaaagcacacctgctgggacttgatgtagtgtattctttactgggaaatatgacaggttgaagaattcatataaaaatagtgtttttctctatgatgagtaatactaaggcaaggtattttcttatgtgttggatgaaaagagatttacaaagcacagaatggtgacaaaaaaaacaatggctagtaacttacagtaccaaattcctctttctgtcagcatgacaaagaacaaagataggaaaagtcccctaaataccttggcagtgtcagagtatctgacggaggcatcaaataaaagcacatgaattatttcacctcatttaaaatagagcagtggtttctttaggggtatgaacgatttcttgactttacgcctgagcagagtaagataagtgtgatctgatctagagagaagtttctcacacagtggcgcgtgcacacacacacacacacacacaactacaaagtgtcagaattttaatcacacaggaaatctacattcgaagctaaaaaatatatattaacattacaattttcaccttgcttgtttttcctctttcccaaatgtcagctacctacttatctaaattttgtttttattaattttaatctgttttcaacagtagttttattggcctttgtgactcatcctccctcatgcaatctttgtactcaaaaatagttagaataatattacatcaaaaagtattaatttccaaatgattaaaattttatcccttttagtagcaacaaagaattttaagttaataattaaaaatacccattggtgcactgatgtcagaacataatagagttggggaaatatagaaatagtcagaactgttgactttgagctactagtgaagctctggagtgactggtacactagaaaatggatttcaataatttccaaaactctatttgttggactttgcagagtgggaaatttgacaggaaaagtttaactgcaatgagttcataaatgcaacatttcaaagattccaaaatgcttcccaatacagctgtcctatagttattacaaatatgactccatgcccacttctcatcaacaagtggcatatgcatactcacttgttctctagtaaaaagacaaacattttcacaaatggtttgacaaaaaactgatcgatggtatagacacctggtgactacccagacactgtgctgagtatgacagggatattccctgccctcacacagttgtcagtcttatcgggaaaacgcatacttgcataaacatttatacaagcacatttacataaacacgtagctgtaatcagtgcttgaactccaggatcaagcctcatgataatggggtggaaagaaacagataatcttctcatgataaattcgatctgaaatctgagaatgggaaggttaaaaagtgtgtggcctgtgggtcaagaagtgcaggggaatgcttttttatatttcatatttttggcaaaaggtgccaaacattattgaaacaggtgtaacgtgatgttactcagtggttttaatttgcattttcctgatgattactgacgttgaacctcttttcatatacttgttaaacttttgtgtgtcttctttggagaaatgttattctagtcctttgtccatgtttaaatcaggttatttgttttctttctattgagtcataggaatgttttctacgtgttgtacattaaccctgcatcagatgcacagtttgcaaataattctcccccctctgcgggttgcctctttattttattatttcttttgttgtgcagaagctttttagtttgatgccattcatttgtctatttttgcttcttggggaaaagaaaatccacgtacactgttggtgggaatgtaaattagtaaagcaaatatggaaaattatatcgagattcctcaaaaaactaaaaatagaacaaccatatgatgcagcaatcctactgggtatgcatccaaaggagaagtccatatgtcgaggcggtatctgcaagctcatgtctctagcagcactattcattaatagccaagctatggaaacaacctcagtgaccctcaacaggtgaatcgataaagaaacgtaatctatatacctaatggagtactattcagcctttaaaaagaagacagtcctgtcatttgtgacaatatgaatgaaacagacatcacattaaatgaaatgagccaggcgcagaaagacaaatatcacatgatcttgcttacatgtagaatctaaaatagttgaactcaatgaagccgagagtagaacggccattaacaagggctgggggtgagtgggaaggaattgggagatactggccaaatgttacagaattaaaatcagaggacaaggaataatttcaagtgatctattgtacagcacagagagtacgtgtggagtatgcagtgtactgcctacttgaaaactgttaatagagtcgattttaagtgttctcatcacaaaaaagaattcacatgtgatgtagcatggaagtgaataagctccactgagcaattccacaatgtatacctatttctatcaggttgtgtaccataaatatatatacaattttgatttgtcaattaaaatataaatttaaaaaaagattgggaaaacttgaaaaatcttcagagtagggttattgggaagattgggaaaactgaaagatccatgtgcctgcactcccgtcagagaagacaagagctgaggtaggagaaccgggcagaaaagttgcatgtgaactaccgggggctgctgaggaggtcttggctccccctgtgagagcagggaggggtcaggggagtgtgggaagcaagatattgactgacctatttcctctttaagaagatcctggccaccctagtcaaagcgtatttgagaaggacaagaacagaaatagtgtgagcagttaacagtccattgagtggaaaatgcagagtaaaatgatatggcttcaatctgaattattttctgacgtgcccatgtaatttcacatttttaaaatatgcaaattgagtggaaatatacagttatattacatgagttaagaaattccaattatgtgtaaaatatgtactttgattctctttaattataaatatacaagagttgggaagggcatggtctgtgtccccactttgtttgctaacctaggcacttgaattagctttgcagaaatcaaactgaaaattcatccacacagtatcaactagcctcgtgaagtttagagaggcaggtcagtgttttgattctgtttatttctgggacaaattctcacttaggcattagaggttcttacgttctttaacacataaaacaaaccaataccttacaagatcaaatcaaccaattaaaatatgcatgttttgctcacaaatctccagggtagcagcacaggtggtaatgcttcaacatagaaaatgagggggcaaaaaaattttaaatcataatctctgtaccatgtgtcagcttgtaccatgtgtcaggtaaggcttagaggtcatggttaaaaattgttttttcttcaggtaattttatcaccatttctttattctccaagaggagaagtgtttgggcaatatttctttaacagttcttagatctagatggatttttcaaatgtattttttcttaaagttcaagaaagagcgattaattttgagagaggaacaatctacacttttcatttctgttattatttttgtaatctgacagataaaccatctcaaacataattatattgaattttggagtttgtctttcgcctctgattttgactaattggttttacaataaattggatcactcaataaatattaaaataaaaaacaaaaatattgtaacattcattcttgtttcaaaacaacaaaacattgtaacattgtaacactcttttgttgtttcaaacacagtaacattctttgattcaaaaagttattttgatgtaatatactttgtttttgtaaagcacacgcttcataataaatgttttgagtactaaaatatgatattcaaaataaaaatattatcttttgatggtctaagatatttgtgacattctgtaccaacagtgtttatataggaagccatgttgtacaacaagtgtgccacaatttcaaaaaagcaagaattgatcttcagaatcaacagttatctacacatgtaacttgttgtgtttcttctgcagtctttgtcaatttttttcatttttatcctgttcatggaaacaatcagttttttttaatttttaatttttattttttttgagacagagccttgcactgtcacccaggctggggtacagtaccacaatcacagctctctgcagcctcgatccctctagctcaagcaattctctcgcctcaacctcctgagtagttgggaccacaggcatgtgccattatgcccgactgattttcaattcttttgtagggacagggtctccccatgttgcccaggatggtcttgaactcctgagctcaaagcaatcctcccacctcagcctaccaaagtgctaggattacaggtgtgagccaccacatctggccccatcagcaatttgatgatgctaaatttgcaaacacaacagtttttatctgcttcttccagtgagtatgtgttgtttttaaaagtcatttaaaacctgaatcaaatcattacagtcttcaaaattaccctgggtaaatgggattgtctggctcttctactttaagaatctctcttcacttcctatttttacaggtaacattccacaattcctaaatattctcttccaatcaaagtataatatactccctatttatttttcaagtcacttattttcatccacttttgcttccttccccccaacacacagacacatataaaccaggcttcactcttattttttccctgttctgaaatcacttccctcttccatcttgataaaactatgattcaaaagaattcctctgtgaattcttgcctaactctgacagatagaataacccattgctttctcggtacccttgtagtttgatgtttctttgctgagattactcttatcatgttgtactggaggaattcacagttatctacatcatgcccaaccaaccatcatgacaaagacagttttcacattttaaaaaatattttaacttatatttgttaaattcattttttcaaaatattttcctctattaaataatgtacagattagtaattctcacatatttaaaagtgtgacttcactctaatgactaagtcatcaagaactaatgttccaatatggatcttgccacttttcaccatctatccactaaatatacacatgtgagtcaccgcatatcacactgtgataggcagtttggcagacacagaatcagtggagaatccaataccgaccttcatcaacacagacagggagaaatgacatacacagatgatgtagctagggaattggaaactgcaacttaaatgaagctgtgataataggtgttaactaattcacagatagtgggacctttatttgtatccaaaacattctatgaaagctttttggaaagatataaacattgaaacaatggtttggattaggttatagatgatgggtgtgcattcaggattgagatagcttaaggcagcttcccagaaagtcaggcgctctcaggactctgttgagagtatggctttctttgaggaagaccaaatcaagaaatagtgagacatgaaagtaattgttcataacagatgaagacaatgactccatagattttacaatttgaaggaattagtggaggattaatttcacttctaatcagttagtaaggtcttcattatgtataccgttttcaaagcacatttgcactttatttgaaaatcatggccgggtgcagtggctcatgcttgtaatcccagcactttgggcggcccaggcgggcagatcacgaggtcaggagatcaagatcgtcctggctgacactatgaaaacccgtctctactaaaatatacaaaaaattagccgggcgtggtggtggacgcctgtagtcccagttactcgggaggctgaggcaggagaatggcgtgaacccgggaggcggagcttgcagtgagctgaggtcgcaccactgcactccagcttgggggacagagtgagacaccgtctcaaaaaaataaaatgaaataaaataaaataaaataaaataaaataaaatcatcacctctctgtaaccaattacctttataaatacctttaaacaattaaaaaatatatctcatatatcaaatgaaaagggtgtgatgatttatactatgttgtccaagttatcctatctagaactttgcagactgaatcacatatctgttccacatgtcattcctaaaaacatttgaagatatccatcatgatgtgataagcaaaggactttggtaagttactttccctgaaaattgcatgttagaaaaaatcccttatgaacgaagatttgacagcatcattattcagaacaaatcgaagccaagatagagccataaataagtgtaagagcccaaaacgcttaaaggtacgcagaattgcggtgatggagggccgagctggatattgattatggaaagacagaaaatgtattaagggaaagaaacatgacaagacatactggcggttgtatttgagtagtaaaaaagacttgggaatcaaaataagctggaaagtctggggaaagaagtgaggaagatgtttgatagacaggaggaagtttggagtagaaggaaaggcagattcaagtctaaattctgctgagttttaggcatctgaatatcttggaagtctcatgaaagagaaaaaatccacgaacttagatttggaaattcctagtgtatgtaataattaaagaccaaaagatgatagaaagtagagcgacctcaacagagctctgaggattctatactgtgagtattatggagatcaatgcaaagtttacagagcagaccaagagaagaaagctagttatcagtgagtttgggtttaaattataagggccagcaaaaatgctcaacacactattcagatggttgtaggaattctcttgaaatactttttgagatataattttcattctttcttgaaatcctcatttgactaacccagacaccaaacagatcttgggaaagctgaaagaacacatcagagactcagactcagaggcagttactaaaaggagtctacagtccacctgaagagacaaaataaatacacaagaaataaattgaaacattaattcaaaaatgtatgcggactggccaacaagcatatgaagagatgttcgatattattgatcattagaggaatgcaaatatcatcacctcacacccacgcagatgactactgtcgaaaagaaataaatcaataaaaacaaaatagcaactgttggcgaggatgtaaagggatggcaaacccgctgcactcttggtgggaatgcaaaatggtgcgtggtggctactgtgaaaaacagtatggtgattcttctgaaaattaaaaataaaactgccatataatagaggaatccacttctgaggatatactcaaaacagtcgacatcagggtctcacagagatatttgcatgtccacgtgtgtatcagagctattcaaaacagacgagaggtggaaccaacccgtgtcccttggcagatgaatggataagcaaaaggtggtctcttcacacgaaaattatttatcctaaaaaggaagaaaatcctgacataggctacaacacagatggacctcaagcacaatataatcagcgtaattagccacccacaacaagagaaatactgaatgatcccaaatacatgaggtttgtagagcagtgaaatccttagagatagaaagtagaatggtgattgccagaggctgtggaagggaacatggggagttactgttgaatgggaacagagttttagttttgcaaaataaataagtcctggagatggatgatgtggttgattgcacagccatgtgaagatacataacacttctgaactgcctgccgaaaaatagttcagatagtaaatttcatattatgtatatttttaccgcaatttaaaaaaatacatcccagcattttgggaagctgaggtgggcggattacttgagcccaagagttttaaaaaaacaaaataaaaagaggaaggacatgaaaaaaaaaaaagtggtactcagtaaaaatgctttaaaaaataaagacaagaatagcctcagtaaatctctggataagaaattctaagtgatgtattcaaggtgataaagtttgaatatttgaattagttttgggaaaggagacttttttcaagagaacttggcattaacaaagacaaagagaaaactaattacagcttttggagggtacaaggaggagatgatgccacctggagaagatgatgaatactggagaatggtgacggatgaggttaagtaggcagcagaacccagttttggagagtccaaggtcacgccttgccactgaaactagcaggatttggcagacaatcacagaaactcctgaataatagcattcactcgaagaaaacagaatgttatcaaactccgctgggagctatgtgcaagaaagtaggacatatcagaggctccagaagacacggtagagacctgtaataagaaccagtgggctcttgtgaacatcagacttctcccgtctgctgtggtccttcagcattgccgctggcaacgaaagtccacttgcacacccagctgtctctacgtggctctgagtccaatcgggttacagggataacttcaaaagcagtttcaattaaaaactttgatactccgtgttgttttggtctgactcaacatacttaatttatggatctaaatccctgtcttgttacgttctcagagactgatgcttttggtcttgtgagatgaagaaagctttttcccaaaactaacctcaatcaattaatatgactaactgaaaccttaaaacaatttttgagggtgctttagtcaccattgagaaatgcccccacctagtgatgaaggaactaggtcatcggtcattgtccatgaagatggctttggaccgtgtgttgagtgacaggctggtctgcccagtgaccctctatggagactaccctccccaggtacaatatgacagccatccccccagctgcctctaaccaggcctgaagcatgtccttatgaaggattctgactctgtataagtgaatagaacactaaattctaggcttatgtctaaggaaggaggtactaaatttatgccatatttagaatctgactcccgaattaaaaatgaagcaatgtggtaacaattgtattattcactcactctccccaaaggttgaatatgtgtagttggtgtacagttcagcatcagtaggttcagttataacaccaatgttactggcttcactacagggaaataaattagactgtgattctatttaaataaaacatgcctccaattacacatttattttgacataagattttaaatcatagccatgatttaataatcagaaaatatatgtttcttttagaaagacagagcatatgtacatacgtattttaatatttcactttcttcatatatattattttgaggagtcagtaatcaatgtctgtaatccaaatgctaaacaatcagcaaaataagaactttcttttaccagtagtattgttgcaaatgctacagaatttgtaataggataatccatttgtagttacatagtcatctataactacttgtatccatctgtgcataaatttatatttaacacaaattcacaacaaaataaaacagaaaaatatgttaacagaatacattcactgctgttatctactttttaaatgttgtctgacttcaaacagtgaaatttttaaaattaccttggcaatgatataataaactcaggaaacctataagaccatttggtagtttggaaaaaggtcagttcttctcccagttaaaatgcataactaaccaaattctcagcactaattaatgggaaattccctaaaataattaattatgtctaagaattaccagtttttttctcacataggtaagaaatgtcaatatttgacttgtcatctgtccagatcatcaacaatgagaaaatgagaaccatgtggtaataacatcaatcccacatgtggtcagaaaggtggcatgataattctctgaatataaattaacttgtatgaaaaatttgaagattttcttcccctacatgtaaacttacggcattcttcttcctccccccagtgacagataaccacttacattttgggttgatcattcttggcattgaaaaataaattcatcataaatatattttgtctaaagtttgtagctgagtttgcttgcttgatacattataaaactagtgtcctacttgaatttgcattttttcaaacaaaaatatgtttctaaaactcatcaagtttttgcatatagctgtgttttatttatcctcactgctatacaaaatatcattttgtgaacatattgcaaggtgtgcgtccattctcctgtaagacattcgggtaattcttgggtgctttgtgcgtttattcctattgttttctttttttaagatatccataaaaaaatctgctgtatgaactttcttccacatgtcagcttgtgttacacattcacttttctgtaggaatgtagataccatagtagtagaatttcaagaacattaatttttttttaagtgccaattattttccaaatggtcgtatcaatttatactactatcatcatggtacaaagtttcctaatgatcaatttatttttacctctcgctattgctacaggtcataatatatacgagtttagtaggtatcaaatagtatcaaggttttaattttttatcgtctttaccattaatggggttgaatatttttataatgttaggtatagttgttattttgttttccttttttgaagtgtcaattcaaaatatttgcacatttttttcttagaataattgtttatatattctgtactagttacttgccagtcattcattgggcatatctatctattcctgatttgttctttctatttctttcttatccagtaatcttgatgtctgcatttatttagattgcataatgaccttcattaaagtttcataatcttgtgaatactggttttgtaaatctgctagaaaatttattcatagtacctttatgtttcattcttattttcaatggtgtccttctcaattacattataaaattatcactgaaatatagtattataaatatgttgctaggttgctaaactcatatttttaaataatttgtgtgtataatcttttgaattttctatgtaggcatctgtaccatttaagaaaagtgatagtttagtttctttctttataaccctgaaagtcttaacgtgtttttatattcccttattcccctagaatggagctgcagcataaggatttttagaaaaggttatggtgtgaatcttttcattccgattttagataaaagaccatgtttttacataaaaataatgtttcctgtggatttttggtagatataattttagatgtactttatatagcaaggctgatataatttatcactttaaggaagcctccttctgttctttgtttgctaaatgtctttatcctaaatgagtgtaacattttaacaaatgcctttttggcttctgttgggataactttttttgtaactttaatctgtaaatgtggtaaatggtaaaggttttctgatgttaaactgcctttgtattcttaggataaactcaagtttatcatgttataatattgtcttaaataccattgcatttggtttgtctataatttttttagaatttttgcacctatcttcataaatgagagtggcctgggattgtccttttcctatggtatgcgtagctgttttgttaaaaaaaagttattttggcctcattaactgatatttcactttattatttgtaaatgtttgtgtaaaattgcagtcatctataccttcaacatgtggtgaaactttcctggaaaattatttgagtatgctgtattatttatagaaaaatattcaaccactgcctcatctaatttagtagttctcaaccaggggcaattctgcctcccaggggatatgctgcaatgtccagacgtgcttagttgttgcatgtcacatctggtatccagtgatgctgccaaagttcctgaaatgcccagtcaattgcccttccacatccccaaccaagaagcatctgaccccacatggcaatagtgccaaggctgagaaatactgcattagttattatgagaattttaatgggatcatttgggttacagttttctaaaaatgtattaattttatcttttcaaaaaaattgatatgaagtttctgtggcatttcctaaacatgtactcgaagcaatattgagcatatctgaaggacaggatatatatatagagagaatatataaggttagttcaaaagtaattgcctggcaaaaactccaattacttttgcaccaacttgagtgtgtgtgtgtgtgtgtattctatctacattgcaagaatattttaaacagttaatgcaaatgttttttatctaattggtcacgactattgattgagattaaagcaaaacaccttgatgaataatggcacagggaagaacctagaaataatacctagaaatatttctctataaatatttataaaacatagaaatgtttcatatgataagattttaatatatgtctatgttcccatgtagcacacttttgtatatgattgtgctatcataatctttgtaccaatgtcttctgaaaagtatttgatgcttatctaattaaaaatacaaaattagtcatttatgccacacacatattttcattactttatggttaattctgattagtaagtaaatgattttctcaagtgacatttgcagttgtctttaaaagacagattttcaaaagttaaataagtagagggttaattcataggacaatgttacccacaaacaagcgtttttagattcttttattttaaataaacgactcaacttgtgaaaaagcagaacacctgcaaaataggataagaaataaatcagcctacatctattaaacatacactactttattcataaaaaagtaagttgtttttagtaaagcaactaactttttataaatttagtttctatgtaaaacactacacatttaaggaaaaagcaaagttacttttgtggtaatatttgtcattgttttaaatggccaaggatttccggaaaaagaattcagagtttactttgattacattggcaataaaaagagttggtcattgaataccacgcactttcaaacaatatagcattatttataagtggcagcacgctaagtcagacaatgaccgtaagcatcaccactcaaccactcttggtgaccattaggagcaccactcaaccactcttggtgtaccctaccttggcttaagaaaaagtaccagggtggcaaacaaatgtacttgtttaaagtaccattcttgacaaataactgaccaattacaaaacttggagacttgtggtaaaaaaaacaaaaacaaaaacaaaaacaaacaaacaaaaaaaattaatagagaagggacctatacataatttaacccccaagaagtagcttcaacaaatacaaataataaatgaagaatgagatttagacaatgtgaaaaaaatgtccatctttctgacacacaccctcctcttggactgtccccttgtttctgcatcactccttgccttaaatcttggtttcatggtagcctgcaacattccatatggtccacattaatccacaaagaaactgtctctttcctgtgtcattgctgataacgacttttagtctctgcctgaaattgttcacgctcagtctttgaactgcggacttcacaaaccatatttctattacttgagctatctctgctcttaattgctaattattctagccagtcaggatcagaggtgtgactcctttactaccttctattaaaaaaaaagaaaaagaaagaaagagggaaggaaggaaggaaagaaggaaggaaggaaggaaaaggaaacagaacagggaaagggaaagaggaaggatgggaggggagaaagagaaaagaaaagaaaagaaaaaaggaaaagagaaaataaaaaagaaaagaagcaaaaaaaaaagaaaaacctgcggggtttttttaatgcctgtgaatgacttctgggactgtgaaatgttttatctggatttcctacttttagtaaaaaatgaggaatccttggctgtggttctaccagaagaatctccctatattaataatgttactcacaatctttctccacccacaccccctacctttccttaatatctctggtgaaagatatttctgagccttctcctttgcacaagctgcttataaagatcaacaaagttaatacactgaaggaccaccctgcatatacaatgagctataaaatattaatgacattttatttatatatttagaaaaaaaaattattttttcccctaggcctgaaactggtgactccttcagagccaagcttctaaacatagtttatcttaaaaggttttaattatatatataatatagaaatacatatatatacacaaaatatattttacacgtaattgtaagcaaatatgctgctatattaatgcatcccaaatagatctgaatagtcttaatttcactaaatatcttgcacaaaataatgtcttaaaattatcacacacacctctcctacacaggaaaagtaatgtaatcaaaacgtaaataaagccatgtttgctccgtggagttaatttggatttttttctataagataaactattatagataataaaacgcaacaaatattataatcaagttaattagccaacgctttttgggaatgaaaacaaacccaataagtgaaactgaataatgtatgcgttgattcaaatgtccacacagtttcacacttaaaaattgtaaaatggaagagtctatattagtgagtcatacttactggatttcaattacctatgtctaaaagaaaaggcaaaatatttaaggacataaaagtttaccttttcatgaattacttaaattctattttttcaatactttaatatgatttttaaattttcactttaaaattatccacactatgattttgtatttaattcacaattcacaattagagcatagttgatatggtgattgtggtagaggttcaaatatggatttaaaaatctatcagaagcaaaacatggaatacattaaaatgagtattaaaatgagtatatcaaatattgagagattcctttatttttatttgaaatttcctgtaatttcaatttatagcttacatcctaatgaaacaatacttctacacagtaatcagcgtttttaataactctgactatatgcaggtaagcttgttggatgtagactgtgatgttgttaacaaatgtttttgaatgaaatctatactgaactgattcactgctacatactacaagacatggcagtaattgatacaaaagtagaaggctgtttttattccacatccatgcattcatacttatactaaaggttttccacatgtgagatgagagtgaccattaatacgtgagcagatgttaagacaaaaaaacattatagtccttaaaagaaatatatattcaaatggaattgtaacagttattaactcaaattaactgaatttaattctcaaggtagaagatacactcaaagtataaggtagcactcattgtaggaggaaaatcttttatttcctaatgagttttgctgaaaattttccagccttatcttttgaacatatatttctaaatagcctaactaaatcagtcttttagaaagtacaatatctattcacaattgaacttgttgtaacttttcattaacagatactaaatcctgaatcaccatttatggaaggactatgcgatcaacacatgtaatcaatatgaaggacaaataaaatcattaagattaacactatcacttcaaatactaaataattgctttataaggagcatttctggatgaacccaacatcgtccacggtggcaagttatgtaacttgaactgtgcccttataaacctttatctcaatttgtttctcactgttgagaaacgattgtcaactagtcataaaatttagtaaagaaaaaaacttggcaatactcatagaaatacacagaagcagtcagaattaaatgttattcacattaagaaaagaattatcaatatgctatttttacatgttgctaaatttgcctgttccaagatttggatggagatcaatacctgtctttctgcaaggctaattctctctgtctttggtaattttcccaaaatgtggtttgtgaactatctgccacaggaagaattatctgggatccctgttcaaatgcaggttgcaggactcaaccctgggcttagagattggactacccaggagtagggatcaagggttttgatgtttaaaaagctctcctggtgcacctaatgcacagtaaagttaagaaatactaccgagattaccagaaacacagcagcaatgaagacgttacccttcccacccacctgttaaaaagaattgagtgcttttctttctccaaattcataaacatttcttccatgtatcctacctgtgccaatttaaacacattattttatttctaaatgccaaagagtaggttcaaataagaaccaactatttgccatttagaaataaacaaacagaaaacacattatgtgttccctaacctcaaggagctcagagtttaagaaattatttttaaacaattaccaattacgatatggtgtgataagtgttacaacagaggtgcaaataacaggttttaaataaaggaagcttgttatttaaaaaggtgatatttccatttgtaactctaaagacacattttttgtgtgtgattgttttctgattgaagctgtttccaggttagcactcccaatgctgtgcacaattgtatagctgacaccatttattgatttgaatgatgactgaaattgatcacgtggcacaacagaatagatgcattccacctcaattcatctatagattttatttttttaaaaaatatgtttaaatgataaacacattttatctacttagaacttttatactttctaaaagaaggatatactataaaataaaatcctaccaaaagcaaatacccaatgtgtactcatctgaattcatgtgtgtgaatgttccttataagctatcataaactacataagcaccatggaaatatgcagagactggaggataagagcaatattaataataactgctattacacagaattacggttttccatacttgactttaagaaaaaaattctcattttctcttacttttgcttttggtgttgacaagattacacatactaactcataacttcaggaattcagagtactttgtttcaaaatacctgattgaaatgatcagtgaaaacatgtttctgtttgtctgtgacacttttatcttttagaatgttcctgtctaatttttctgggttttcaatgttctttcttagacgagaaagccagctgattttctcgggacatccattgctgtatgtcagtggctctcaaaataggctctggaacaatcgcttcagcatcacagaaatggctttaaatgggactctttggctgcacctccagttccctatatcagaaaccctctgagtgcagacctacggggctgttcccgttggcttctacccattcgtgtgcacagaagttttcagaaatgttgcaatgcatctttgaaacacagtcatccttaaaaaccaataaagttgcataaacttgtaattaatttgtattttaaaaactaaggttataaatacagaaaacagtacttcccatgcattttatgactttttattatgattggtgtctttcatgtgttgagattattgatgcctactgtgtctgtttggtggatgcactacttcgaccgcaactctcacctctcttttttttttttattgtgagacagagtctcactctgtcacccaggctggagtgcagtggcatgatctcggcacactgcaacctccgcctcctgggttcaagagactctcctgcctcagcctcccgagtagctgagattacaagcatgtaccactacacccggctaatttttgtatttttaatagagacgggctttccccatattggccaggctggtctcgaactcctgacctcaggtgatccacccacctcggcctcctaaagtgctgggattacaggcgtgagccaccacgcccgggccctctcttccaaactgcatgttaggtggtggcgtaacagtaccttcaaattggccaacatgggaatatttaggtcgtagaaattggcaaacactgccaatcagtatctttcccctctagaaagtagttgttaaacttcagaggcaaaaaattatatttaaaaagccatccaggcgattcagatgaatggctgagtttgagaaacgctgtgctgcgttctgtgattttcagtatctgaaggattctagacaactactctcagactgctccagtcacgtgctcaaagaccacttgctcctatcctggggtgacgtaaaaccacttaggggagagttatttggttatcaccctaagaactgctaattactttctcgctcataatggatgacagagttatcatttttctagagttgtttcttttctacttggggccactggagatttgttttctttttaagttgttcaacacctttacagccctccttactcgctatttttttttaatttaaagtgacagaccttgcatagtctcataattttaaaacatttaatagcatatgaataataaaaataattaacatccactataaatgtatacttgtttaccgtaagataggatgatataagatgtatatatacacatacattttcaagatattataaaattcatatgtgcatatatttaatatacatattaaaatatattttaaatatattataaaatgcatatgtgtataaaaatatatgttatcatatacacacgtattttaaatatattataaaatatatgtgtatatcataacatataatatatttaaaatacatgtgtatatcatcataacagatatttttattttataaatatatgtaaatgcagaaaattactggagaaaatatgaaactttcagaaaacaaacaagttgatattcactcacttacagtatgatgaacttaatgttccaacaaagactatgtcaacacaagaggaaaatattccagggaatggagacttcacaaacaggacaagttcaccttccacttagattttctcctcccacctgttgcattgcttccacgcacctcctgcagaagtcagtgtgaactcatggtgttccctccacaccaagcggcaatccccaaccaggcgctctcatttttgtccacattcaattgcactggacacaagggaggaaagcagctatttgggaagcctaaccatgctcctgattcttgtgtctgctgaagcagaatcctaagtctagctagaaatgtgagaagaaattcaggaagaggaaacacattaatttgagactgttgccagatatgctagaagtatgaattttaaaatataataaatcatgaagagtaataaaagcaaatgaaatctggcaattaggtaaaaacagtttgtgacaactgaaaaacactgacctgtagacctaaagctatagcaaactgttctgcctgggagcctaatattactgagttgccttcaggaatcctggagtcaggcttgaaattctcaccccacacaaagggcaaagcccctaatatttttttaaacaaggaaagatgcgttggcagagaagagcacatttggcagtttgtgaaaaattatgttcaaaaagcaatgaaacacaaatctacgggcactatggtcggaaaccctatgtaacaggcgctttcttctttttgcctaagttctcttgatcatttcagggaagacacacatatcagagtagaaataactacttcttatcaacttttctgaagtgcttatatgagaaattcattgtgatatcagtgtctttgtagacaattaaaaataatcttgtgaaagatcctcatatgaaagaaaaaaatgcactgaagaaataaatgatgtttaccattctagagttaaaattaacaaaaggatataaaaactcattgctatagtaagattttttgtttgtttcttaccatgtctcttttcccattccccttctctataaggactcaccatgcttaatttaaaacgtgtacacaaactgactaggacaggggtgtactagctaagtaggtggatagtacaattggacaatactcagctcctgcagtcactctgccagcccctgcaatatggaagtgtggattgataaagctggtgtctgtaaggagaagtattttagtcatttacttgaagtactccttctgcttttctctccttagtaagatgttattttttccataattgtgtgatgtcaacagatggttcaagtcacgacgttgaggagaaagcatctttagcattcatttgataagagggagcttcatgtatttgagtgttcataatccataaagtgatgtctcaaattctatgaggtctttcctgtccttagaacatatgtttccctcaaacaaaatgttgtttcgatcaatttgtgtttaacatactctgtttccacattatatttttatagttttcatgaagagtcaatatattcaatatgagattagaaaaacaggttcaatgaaagtgcacatatttgacacatcaatttttttttaacttttacaaatatttccaattgtcaaaatcaagttaaaggtgaacatggttgatctttacccacctattttaaaacaatttttaagcaattgacatttcttcaaaatgtaagtctataataaaggtagatgaaggttaaaagtattaacagaaaactgcaatatatattgaagatattgaggcttacagaatcaagcactccatagttcagccagaaatattcccacagttaatttataagctcttgaaatgaatagaaattctgacagcttcttaagcaaggcagtgttctgagttctgctacaataataagctattcaagtatgggatctatgtgaaccagtctttctggttttgtgagttaccatggagtttttaagaataatagacataattagatttagtgactcaataaataaatgaagcttttatataagtcatcagtaatttccccctgtttcaaactagaagtgaaaaaagcggggctttcatgaagaaaatatatcccatgcttctgacaagtgtctaaaaaatgcatgtcctttagtcaaagaaagcaggtaatttattgacttctcattccttcaacaaagaggaaagaatatttttagaaaaaaatataagcagctgcctttgcttccttaggtcttgtgagaattacaaaattaaaaacaagaaacgtgaaaacttaaatcttaattgtatgctttaactgagattatcaagccatgctatatagtatatgtcatcaaatggaagatgatttcatctagagggaaatagtttagtctatgcttagttttaatatagatttttaaaggttatatgagaatttggaaagaaattgcacatatcactggtttctatgacacagcttccaagtacgttctgttcaacgttactgccatgaagcggtgcttgttatgtatttttaaaatggattctggggtcatatgttttggaaaagctaagtagatatgtaacaggtatgtttattgtaggaatttctgggaccttcttattcaacatgtacctggtgttccccgcatgtcaggtggcaatccccaaccaggcgctctcatttttgtccacactcagttgcactggacacaagtgaggaaagcaactagttgggtagcctaaccatgcacagagaggcaacgccctcaggatatcctgtttgttctatcttcaaacgtatccagaatccaacaacttccagctgctccatggtgaccactctggtcacggcactataattatcacccgatacctatctaactgctgtaggcattgagcaggcttcctggcttccagccttgttcctttctattctaatctcttctcagcgtattatctagcttgtctaactttgatcaaaaccctccaatagttctctcagttcacggaatgtcaaaatcctaatgaccaacttacaccagaagtcttcctgtacgtgacctttgttctgactgttgcttatttctagaatgattttcccagatatccacatagctaactacctaaccatttaacagtctctgtgaaaacatcagtgtctcaatgaggtgaactccctcattagaattgcaacaacaatcttccctattttctgctctacacttttaaaataacacttactctccttaaaaataggaaaatgtattttgttactgacttatggtttctctttgctcactaggatgcaatttcaacaaggcatatgtagccttcacagttactcagaacagtgccttaccaccattgggactctaaaaaaattgccaaataatgaatacatttttaggagggatataatgtgctcattacttctgaaatgtactagacccacaaaactctttttcaatatttctaaagatcactgtctcaggaaatcttgatctaggacactcagaagatgaaatacaaataatatcttgaaggaaatggaaaagataaactatacataacatttgtttaattttgcaacgcccctgatatatagacaagtgtgtttaatgttctgacatcttacttagaagagaataagaaatatcactatgatgatgtaaatttgagagagctggcaagctaccgatctcactcttctttcccactgttgaaaactactttcacctggcatgtgctggggataaacaaagtaccaaactaagctgaattccttgtttatgattcttcaaggaacaagatagatgtaaagttaagcgcttgtacatcttatgttaaaaagtatcctgcaatcttcatacacaatagatagaataatgccagtgcatacatacagtcatgggtgcatgcatccatacatccatatatccatacatatgtacatccattcatacgtacatacatacatgcataaattatttcttgctagttttagtccggtagtttcctaaaaataaaattgcaaattcctttataagggtacacaagtttcttacatctaagcaagaacagatgatcatctgttataaaatggtaaaactattttatcaaatgaattcatttacatcataagttatataataataaaatgtttatttttaaaagattcctcaactcctgaaatacaactatttacaatgcatgtggctgttacttctgatttcactgcacatttttaaacaatgcacttagcccatcttatctattgacatcctaacatcatagatgagcattttactctcttacagaaagattcttcctcttctcaccctacgaaatagtcactacactttggagtaaaattaacaacgggtgtttacctcattaggactataaaatccaagtcatttactatgattaacttcttaccttgaacaactttttgttttcctgtaattgatacatcttacttttagaatgcatagtattctgtgtaactagtgatattttccctaacacttctgcagttatataaaatcctcaaaatattttatcccatcaaacgcatccaaaaatggatccatcccattattccaccgaagacctcactcttagagccttttcaaacattctttcaacctgacctgattgcccctgaggcattcagtagaatgtttgtctcaacttcacttttctcacaggctctttactccttgaaatgtcctcttctagttgatttcctcaatacagtgaaacatattctccaatgacattttattcagcaccaataagtatccattagtttggctagtttgaaaattagttcctcttagaattttgaagacgttaaccattgttatctagtgctcatggttactgtgaaattctgtgccgttttgtcgctcaaacttttgtatgagctctattttcatccagaaaaaccctacaagttgtatagagtaatttttattgttttttttctgaaatgataacgtaattttatttggctgatatttttctgagtttcacaacattttcaatctagcaatttctgtccatttctgagactctttttgtattgtttgacaaatactgctaatctactttcttgttatttcctgttgtccacgtcttgatttcactttaaattttcatcattttctaacacgtgcaaaaattccttccttttttttccaatctattattttattcagttataacatttgttattgtctgcagatatttcttgtctttgaatgtcaaaatcctgtacatggatacaaaatttctgttatctctctgagattagtaataactttgggaaggtttttttgatttactccattatatctattttctttaagtttttgtcatgcatgtaagtatgtatttttttgttgttttttttttgtattggaggcttttacaactatccagtgaaacacaaaacaataatataaatgtaaatttctgctttttttttaaaaaaaaaagaaaaaaacaaatatttgttggagacagagactcactctgtcacccaaactggagtacagtgtcacagtcatagcttatggcagcttggaactcctggtctcaaaagagcttcccatctttgcctcccaattagctaggactacaggtgcaagccatcttgactgcttaattttataattttgtgtagagacagggtctttctatgtcgccaaagctggccttgaactactgccctcaaaggatcttcccacctaggccatctaaagctctgagattccaggcatgtcccatcgtgcccagcctaaattctgtttttatcttatgaagcatggaggacattttctgattagtttactataggattttggcataatcagatgggtatttgataaagcaccccagatgccagtatttctaatttctctgccatcacttcaatttattcagtgaagaatactgcagtctcttgctccatgtgggtggaagggatgtgcaagattgatggatgggcaagaacggcaggagaagccagtctagctgccaatgttcttgggatatggcagagagaggggacaaaaaattacactccttagtaaaaataatttcacttaatctccatttttagacctcttttgtgcttggtgtcctaaatgcagaggcactgccacttaattcctgtaaaaaataaatctatctccacttttctggtagtaaagcaggatgagagatgggaggagaacatgggttggcgctgggaaaaggatcgaagaatctagtgacgctatatacgtatttttcaaccaggtgccctgtttatagcctcccaccttactcctgcatggaactgcacccaggagctcaggtgttatgcctctccaggcctccgcaagaatataggcttatttcccatgggtggccctcctacaggcagtcaattgccctctgtaagctttggtaaatcagctgtaatcccttcattcactttatttatttacttatttattttatttgagatggagtcttgctctgtcacgcaggctggagtgcagtggtgcaatcttgactcactgtaacctccacctccggggttcaagcaatcatgtgcctcagccttctgagtagctgggattacagtcacacaccaccctgcccagctaatttttgtatttttagtagagacgaggtttcaccatgttgaccagcttggtctcgaactcctgacctcaagcaatccacccacctcgacctcccaaagtgctgggattacaggggtgagacaccatgcctggcccctcattcactttctacctcctagaaatagatttacctcccttacctgcttttgtgtctttcctattggtctttgtgtgtttatacatttatttttattgctatcatttatttcctgtaacttagatgatctcaggtggaagataatacgtgtagtatgaatttgcgttgaaattcctctgtgtagacacaggtgtctaaaagctcttctttgaccatacaattttaacactcaactcaagttttcttggtcacttaacaaaataacatgactttcatggcaacgtcaaaatggtaagcaatagaattattgaaattttcactaaccatgggagtagtcacccaatcatactagcctaacctaagctcatagaaatacctccactttccaattcctatcaaatattttatacacctcacttactagtattaaaaaaacaagctgatttcataccaaatactctataacatatagattgtcaaatcctaaaagttaagcatatggcacatgtgaagaacatataaaatttcttattatcttgatagctgggtgaatctggcaagacatatctggctttctgggtttattttattttttttactttctcaagtggcactatcttcatttttatcttcacattctttccaaagacttcaggaccaaggaggagataagagaaaagggaaatacattaatacattttagagcaaaatgaatgaatgagtagcaggcagccaggtatggtggctaacacctgtaatcccagcagtttgggaggcaaaggggggcaaattgcttaagtcccaaagttcaacaccagcagggcagcatggcaaaatcccatttctacaaaaagtacaagaaaaaaaataagccgggtctagtggcatgcacctgtagtcccagctacctgggaagctgaggtgggagaatcacctgatcccaggaggtcgaggctgcagtgaaacgtgatcccatcacaacacagcaagaccctgtctccaaaaaaaaaaaaaaaaaaaaaaaggaaggaaggaaggaaaaaaaaaaaggatgactagcaggagcacagaaccaagaaggacaagaaggactggagttaatcaatgaccctgaagcaggtggatcttccaaaaatacatttttctaacactctttaaaatcttctcagagattctccattctccaggttccagaaactcagttatggtcactaagccaaactgaaaaaaaatgaaaacttctttgtcattgaacctgacaaaaactcattttgtgaatgaaattgttctttttatcgtcgttgtccacctgttgtgcacccacgatggactttaataccagtcgtgtctgatgtaattgctccagctgtatttgatggttctggagcggagtttggggagcaggattttcagcacatcagcccttggtgaattaacctttctttgcatatgtacttgctacctattgattccttttgctttgggtcacttcttcacttcaaaaactgtcctccacaatatgcacgttgctttactttaaagaaggaatcaaatatatttcaaagcctctcaaaatctctattgtaggcaaatagcttatgtaatgtgaatatgcacatctgttctgaagatacaagcaaatatttgtagatagcatacagatatcatgagttatgtatctaagaaaacacacatgaagggcctctgatataaggattttaacacatttcagattttaaaaatgttcccattgataacaattagccaatacttactgagtacttattgtgtatcaggcatagttgcaaatgctttacatgtattacttcaatcaaagtcaaacctgtttatttaaagcaggtgtacacaaggtccccctatctgaatattttgattgaccactcacctgatttatttttcaattttatagatagatgagttgtctcagtgataatgcaggacatgtggattcagaaggatcagaaggatgactgagtctctgcttcacttcgcaatggggcatgtggccctggccaaactgtttaacatctttcagaaccagttttctgtttacttctttataaatgaaagaactgggtttgtccctgaagtttactgaatttcacttcctgtagctgtataagtggaatgaaagtacatgctcttagtctcccataaggttggctggatgttcaaataagataataaaattgaatgcacattttaatttttagagtgaaatactaatgattatttaggaaggaaaaactgcccagaattcaatctaattttatgagcttccagagacatctggaacaaaataaatgcatcttcatgttgattggaggataaacatgttaaaataaagaagatatatatttacataagtagagaaagataacttgaagcaggatgtgtatgtaatttgagaatgatctctcaacatgtgtgagcataactcaagtttacaccttaatcctcatatccagaatgcaaatcagactgaaggatactttatgatatgcaagtatttttagctgaacaatgacttttaccaatactcgaattgaaagagttccaggccgggtgtgatggctcacttctgtaatccccgcactttgggaggccgaggcaggtggatcacctgaggtaaggagttccagaccagcttggctaacatagtggaagcccgtctctactaaatatacaaaaaaaaaaaaaaaaaaaattagctgggtatggtggcacatgcctgtaatcccagctacttgggaggctgaggcaggaggatcacttgaacccaggagacgaaggttgcagtgagccaagatcacaccattgcactccagcctgggcaacaagagtgaaactccatctcaaacaaaaaacaacaacaaaaaaagagttccaaactatctcccggtatttggaacacatttccttgttaggctaatatcaaccatcacttccagatctcaatgggacacatcgcgaggcccttaaggggctgcagacatctgaaacccaactgtcactgtccatctgagagtgactgatgtgcaagtgtcacactgacatgctaaatacatttgtgattgagaggtactgtcttaggtaggttcaccctgtacaaacacagaaggatggtgatgaaatacaagttaaaatttataattaagttcactcaaattatccttctaataatttttatttggcaaaaaactaaaaaggactataaaattggatttaacatgtgtcttaatttaaaataactcagatatactcgaactgtaaaaatccaaagaatttattgcatgctgtcaacatgcccttcaaattactgaagttaattatgtaagatcatctttcccttattcacaagcacggttaaaaatatcaactaaagtgactgaagcattggcaatccagtgttgcaaattccttagagaacgtttgctttttacaaattgccattttactttatgtcattttgtacttctgatgttattgcatggcaggaaattgaccagacatcgcagtgttctccagtgggtgaaggctaattcaattagtcactgatttgaaatgtctgagcagataaatttgtcttaaaaaaaaatcagggttcattcaaaggaagagactccttgtattcggaaaataattttaaacactatgagctgttacttctcatttgtttgcaaagaagagcacagcagtaagtaaaaaatcaaagttggataatacttaggttgagtttttatcaattattctcttgtctgtagccatttcaggcattttaagttgtccttctctgaacaattagttttaagatatccaagtcttctgaagaaaaaaacaataatcactgccatgataaagccattttgcctataatacatattgataaataactacattagtaagcactactaaggtaagagatgttaagtctattaccagtgaatatattaggtgttctatgtacacactctcatgaaattactattccatacctatctctaaatcttaagccaatattttcccccatgcaaatttggaaattcttattaactatttttaattttaacagagttgtaacagtacctatacttcggttctatgttcagttcttaaatgattttattctctggttctaatgagcatgaatcttgcatacatttcttcctcaaatgttaataagtctgtgtgtgtgtcgttcacatagcattagttcatcaataatgaacttcttgtgtcatgtgacttacgtagctagagaactgttagaattcacagggtcgactgacccaaagtttaaaaggaagttgtaacagttgagatgacaactttacaagtcaaaggatgtgctgactcctgcagtaccataccgtgtgtggaagcagaacatttgaaactttccaaaatgattgaaaatgatgtatttttttttctaaataaagacgataggtagatataacatggtcagagattcaaattggcatcattttatataattgaatctgacaaataaaccaagccagccaaattagagttcttaggttagctgagaaatataatttgtttcatgatggatttccattcaaatatgaaagagaagtgatttttattaagcagcaaaaatacaaatgccatacttctgaaataggataattttttccagataattagatttttggtattttagaatcagggttttgattcatttttaaaaattcaatttatattatggagagctaactacaaagtctgccaatttcaccagttataagtgtacaattcagtgacattaagaacattcacaagattgtgtcaccatcaccactatccacgtccaaaactttttccttacccccaacagaaaatctgtaactgttaaaaaaaaataacacccaagcccctggtaaccactattgaaatagagccatttaactgcaaagacctctactgcatagattaagatataggaaaatgcaaaatgcaaaaactaatttccacctgcactactaaaaaccaattaatattttttatatatatttttttccgggcctgaaccaaaggagactctccataatcagaccagtttctctcccctccctcagtgctgatttcaaatattctatcaacagctagtgtggttcaaaagacttagctatctctgctttcaaatactaacctctaccagtggcagcagataaacgtttgctggtttagttaacagaccttaccatgtctcttctttaccaaaaataataaaaataaaaaaaggaaagtctggcagttgcatctcttctgccatttcccaaccagaagattaggatctactgcacaccgcttagtgctacacacaaagcatcagtctgtctctcgggttgccaccaactactgcaatgctcagcccaaacattttgtcattctctccatcactccatgaatgttcaagcccctgtgcttttgcacataggtttttatgaaaccaagatactgtcgcttctggaaagccactattcactctccagaattcatcctgaatgccaccatgtaggtaaagtgttgacagctcactgacctggtggttgcttttataatttgcaggacgaatggatatgtaccttattgtactttattataccattatcatgggattgcgtgtgtgcgtgtgtgttggtctcctgctcactgctatgctagtgacttgtacaacaaacctaatgcttagtaagttaatgttctataagaattacttaggcattttcaatttgctagggcaaaatattttacatagacattattaaatatcagaatattggcatttccttatataatgaggaaagcattgtaccccagataaaacgagatggggatgctcttgccaagatccagtagggcaagttagcatgcatcatctataggagccagttcacagaaaatctttctattcatattcattcattctctctctctctttctgtctccatccattcctccacccaagtagaagacaggccagtgtctaggaaataatattactcttatctcacaacagctcagttctatttttatctcaaaaagccaggttttattcaaatacacatagggctgtgcttttgaacatgttgttcattttgagcccattgatttcgaggtgtgtcaatattttggggacttggagggaagattcctgcggctggctttctcttccacactattgcactatgctccactgttttgatttcctgagaagacaatgaggctgctatgtggaactttaacactacctaatttaattgtttttctcaggcagtagtgaattttctctctctttacttaaacaagtaggatatagtgtcactacgagtgtatcaaaataaaggtagtttagagtttgagtttgaagtatactacggttaaaactggatgcaaacatgaaacatttgtgtattttacatacgtaccatgccttccatggtccgtatattaattatttctgcaatacctaaaaattgaaatgcaaatgaatgtccaataatagcacacagaaatgacaaaagtattcagtttcacataaaaataatatataaagtaattgtatgtaaaaattctatacacatttagaaggcatatcctactttattattggaggtacacagtgtagagggagaacttgacttcagactcgaatcttgtttcttactctgccattcattcactttgggagctgagtaagttgtgagtctctttgatctgcctgtaagtgatagatcatttgtctgtaaaatgggaataagtaaatgtggcaaggggatgtgtattaaagtacccagaacaaaaagattcaaaaatggtatcagcttttatgctaatgttatcattatttttatcttcatcaactttacaaacataattcatgaaagatgtttatgtgaccaaaatgacatcggtcatttatgagctccattataaccccattctcatggaatagaggtttcttcttaaactatatgatatattatggtaactttggacaacaggtggtatgaacaatactaatgatcttgatttttttttaccagaaatatctctactctttacaatgataggaagcttgtgtgacttaaacacatcataaaaacacttaaataaaaagttataaataaatagcctgacaaatgctatcttaactcaggacgtggattctgaaagagcaagtgtgcctgccgtggttctttttttgacaaaaccaaacaagggtcttaattttccaactacagaatctcaaaaccaggtaataccctagctctagtcatcaaaatcaaagtatggtagattttgaaaattttttcagtattttattaagaaaggaaagtaacgaagtgctttttatgtaataaaggttggagttaccttacaattccttgttaacatatgatatcagtgtgtttacagaagaataataagagtgttatttatggtcctttgtagagaaaaatctagttattccagggtaagaattgacttagtcttaactaactttggtcttaactatgtctgtgactttttttggatctcatttttttcatataccaaattcagacttcaaacaatctgaaccctggggtcccttccaactctcataatctatagtttttgaactcaaaaacaaagcatatgctgacataatgatattaatgatatccagtacctttaagttgataaagtggttaaaaattattttatataagcctcttataaatgctctcaacatggattttctacacattcatgcttaaatcatgaattaactctgatactaaaaaataatctcaacaactctatggtaaaatagaaaatacttataaagaaatgtttagaagaaactcttttctctaacactacaataattcaagtttccataattctaaccttctgaaaggaaagctggcagacaggtggtatttgccataattattataaaactaaggaaatgatgaagaatttatttttatctgacataatttcttgagttttaagccagaaatatatttagcagtaggctatgtttaccacacattcaaagactatgatttctaattgcaaatgcatgcatcaaaatgtatagtcttattcttacttccttgcacacatatgactgagaactattctgaaatatatatatatatatataatttgcttctatgattacattcttcatataaatattaccaacttttatgtcctaattcctctaaaattaatacaattctcattattataagtagaaatatagaatttaaagataagttgatttgtctcattaattttaattcaggaagaaatggactgtaatccccttttagctcagaaatagtagtaggtgatgacttaggacattttctataaaataaactcattgggagcaaacatcatgcatttgaaggataataaacaggtgttagtgatcaacatttatcttcaaagcagcagccaacaattgaagaaagtcttaaagaagtttagggaaaaagccaaggtgaagaggtaagcgataccatacccgttttcaagtatgttcaagcctatctgataaaagaaagagtaatatcgttatacgctgcccctgtaggtagaaatgagaccacacacgtagaagttataaaaacagagacttcaggcttagtacacaaagatggaaatttttgtgtcctgtaagagtcacaaaaccatggaatgggacactgatattgttttgctctgtcaccaccaaaaatttcatcttgaattgtaatcccctactcccgataatccccaagtgtcaagggggagaccgggtgcaggtaattgaatcatgggagcagttccccccatgctgttctcatgatagcaagtgaattctcatgagatttaatggttttataagtgtttggtagttcttcctgtgttcattctccttcctgccatcttgtgaagaaggtgcctgacttccccttcacctgccatgattgtaagtttcctgaagcctcccagccatggggaactgtgagtcaattaaatatctttcctttctaaattatctcacctcaggcagttctttatagcagtatgaaaatgaactaatacagacactaagcaatattcaaagacaaatcgttgactttccttcaacaaccctgaatttaaaacttttgctttaggtaagaaatattgtttgagttttgaagattaccaacacattttccagctatctaaatgacaggcatcatgaagttaggagctaggtgttgtcttgttaattgctctatttcctgaatattgcccagtatctggaatgaagtgaaactgcataattacctgctaaatgaacataggtactgggacctaccttgtggagagtactcttgaaaatactgtaagttaactctccagcatagccgtcattttaaaaattaaaaatcacttggactttctgtgtgatttgatcccatcgttttatattttatatattttaaaagatgtagtaaagaaggtaaaataatgcatagaacctcaattataagagtgcttgggcaatcaaaggaaactcatgctactgtataggtattaaatataaaacacaccaagaaatatgcattaattatccaatatcttgcagaacactttattactttttagtgcctttttggttcctctcatcatattattgagagaaagcattttcttggaatttaaaatgcttgagggcagggactttatctcattcgctttaggtacatgataactgcacaggccttgacttataggcgaagtcaatagagttcattgaacaaacatttgaaatcatttcagtgatttttgtgaaatttacttataaatactatttgcttgtcctgaagcattactttccccagtatgggttttagaacattttctagctcttaaattatacattttcatttgataaaataaaaaataataccatagaaactttgttgaattctatagaatcctacagtttacttcagcttaatgtagtaaagactcaaaaacatctctgcaatcaaacataaaattgacttaaagtgttctctaatttcgtatctctacaaatcttccaaatgccattaagtacactctattgaagaataatacccattcattatcctgaccataagcagagctcttcaaggcttatgttgtgataatagacttgctgatgtgcatttatttattttttattcacccaaagatgtaaaagggaaacttagaattttatgtaataacttagctgttcctgaactgagtataggtataggaaaacccattattcctttcaaatcaacgtgacaaatccaacacaatcacacctggctgaaaacatttttctccaaagtctgtctgtttcttggaataaaaaggaaaagtaatttttacaaagctaagtcacttaataacaagccatccaaagcaagaaagttttagattagcctctctggaaattattttatttacttatttattttagacagagtctcaccctgttgcccaggctggagagtagtggtgcgatcttggctcactgcaatctccgcctcttgggcttgattcttctgcttcagcctcccgagtagctgagattacaggcacatgccaccacacccagctaattttttttttttttgtatttttaatagagatgagatttcaccatgttggccaggctggtcttgaactcctgacctcatgtgatccacctgtctccacctcccaaagtgctgggattacaggcgcaagattttatttttgaagagcacagtctcacaatgtctcacatgtcggttagcacttagctgcaatattaaaagtttcccttgattatctccaatatttatatttggagttgagatatatttaaatttttgacagaattttagcagacacaggctatatataaatcactacatgttgatggagaatgatcattacatgaaaattatttttaacataataacgtgagagttagttcaggcatacaatctttgaaaaaagattggagtcgacgttttatgtataacaaacatcaacatatatatttttaaaattctgtatataatagcaggaatatgcagttggaaggcatgtacaaataatggttagactcagagacctaagagtaagacagatgtcgaaggataacacctttggtctttgctctgcaatccacaatatctgactagaaggtgattttttgagcctcaaatctttgtcaggaaaatatgggatgataaaatacagtattgagctgtctcccaatgatgatgtatgttattaagcattataactatgttgcaactgtatcaactttcacacaaaaaaactatgatggtttatgttgatatactggggtttaaagagagagacaaagaattattcgacaatagattcaagtcgaaattttatatatgttagtctgtgagaaaatggatgtttttttctagagctctactagaaggcattcacatacagcaggctggggaaagaggcttctccccaaaatctgcaataaacatttatctaccaagaagggctaggtccccataaaaaagataatcaatgtgacctagtggttccagcaaattaagagggaaccaaggtcctactgtttttaattcaccacggtgacttttctttccaaagttatgaaaatatcagaaaaaaagtctccaaggataattaatttcaacttacgcttattaaagagaatatctgctgtatatcatttgaagagagactgtagattattgagttaaaagcattggcaataagaaaagaaaaagaataattgcacacatagcaagtattccttttacttcctggctgtaagcggccttattgaatgtgggctactttgctttaaccttctaagtatgtattcatcaatctgatagccactaaaaacagaagtcaagttatgtcagggctgaaagcaaaaggccaaatcacttatttttcagatgaaggaagtgaagcccaggaaggtcccaaaactggaatacagtggagtttggactagaaaccccatcctgtaggctccaggtacaagtattgcatccgaacaaaacaggtgttactctgaagtgaggtaacggtaattcaagaagtaggcaaagggctattaccattgtgagctcttcagggtttcatctgatgtgctgagacaatgaagacacggccaactgtttccataataaccactatgaccagttgtggaggagtcatgaatagtgtatgcattttttttgcaataatagaaaaaaacccagcagatactacttatgaaactcagcactctaagataaaccaattagaggattaaatagtatttcctatgttgctcacattggccatatgtgataaaacataattttatttactatgagaaaatctgcttgaaaaagaaataggtgtacaacagacactcaaccctttctggtttggactggagcttttgtttacttgcaggtaataatttcttaagcataagtgtcaataattggttgacacatgttctcacctattactgggataaacattggataaatatggacataagggaagaacagacactggagaatcctagagggagcagagagacaagggctgaaaaaccatctattggaccctaactcactgcctgggtgacaagagtatccataccccaaacctctgagttaagcaatacacctgcgtaacaagtaataatttatttacaaatgtatggagtagctacctcagaagttgcagctgttccttctctcagtttctttcaatacatcttaacataattatcttatctatttacatactacattaaattaatgaaggcattttaatgaaatataaagaaagtttgttcttaaatacaattttgacaaaaaatacaaaaactgacttcacaatgctcctataatattacgttgttttttatccttacctctgtggcatgcctagcattcaatacttacaaaattattgggactgatttgttgttagtatgtccaaaataatgcaacaatttataaacagcttaaagacaagcacattgtgtgctaaactcatttgctatgaccctcgtccaccctaaataggatgagaaggtattttactccagcatttttatttgttttaatataccccatgccatgtccagcatgtccttgctggaaatgagcttcactttcatggcaaatgtgatatggtaggtatatgacacatcacttcctctcactgatatttttattaaatattcatttaagtaagtgccactttggggcaactgtgcttaaagaaatatagagggacattgctggtcagctataaacataaaaaaaaatcctccagagcatcaagtgtgttctgaagcagtggaatgagggcagatgctgttgtctttctctcctaatagagcaatttgtcagatgtctcccatgtgtactcgaactgaccatattatgtgttggcaaaatgctcatttttatacagcttttagtatcaacagttatattggcgtttctctcaagatggagcacatttatatcaacagctggccttaaaatgttcctatagtaatgatcatttgttttgaacttttccttgttaactattttctgtttatattaatttatatttaattgaatacatattcccttcaataaaagccaagtgagagcaaaactctttctgcaaaggtaagactgaacttaacattcttcctgaaataaggcaagaagggttatacgcccttctaaccttgattgaaaacgcagcagcacttaccccaggcccactgagcagctctcctcatggcacaagttgaaaggatttcaggctggaggagactgttgtgtgtgaggggtgggtgcatgtccacggactcatgcacattgggaaagaaggtctcatctcttctgggctttcttcacattggcatgaaaacgtaaattcacagagctccctttgagagggaacacagcgcacagtggctggctccagcccgcctttgggtggatctcactgaaatcactctcctgaacacgcacccacccacagctgctgccttaccccacgtgcagacccagatgcctcactagttgacataattgttaagtgagcgcctcctaaggaggtcccatttgaaaactaagtcactaagctacaaattaggttgcaggcaggttcacctgctagagatgaatgcattgaaagtgaaagacatttggcatactgcagcgcttttactgaataagtatagggctggcctgataggaattgactaagcacagtggaagaagacccatcatcaatacttaatcaactcattcattcacacattcgaaggtgtccaatacccaagacctcacaagctatttgttgctgagggtcctgcacaggtgctgtatttacgaggtttccctgttgatgtgtgcttggccacaatcgatgtgagagagatacacattcacttttacagccagactcagcatacctgactttgagaagtgtgtatctcgatcatggccacgtgagttctgggtagcctattccaaaggtctcagtcacgtggccctggaagaaacatctaattttcatgtcataatttgggatttatttttatattataacttgggatctcacagatagagacccaaccttttaagatataattgcaggtgttcaaaggggggacaggcaggtggaggtatagcagctttttcaactcaagggtccctctaatttgagtcaggacactctaatcttggaatctaaagccagaaggaaaaagccagatcacactgactgccttaacattattaagccctctatgtttagtttgggtggagggtatgtttaagtcaaagaattgggccctacttatgttaaagatgttaataaacccagcatctttgatttcactaaccgctcctcaccttgaaaaagctaacagatttactatattgccaagtaaataaattaactatgtttttcaaatggcttcactgggaattcacaccatttaaaacactcaaaagtagcctctggtgcttttttgaacaaaagtaagcagttagaaaaatatatgggccagacacggtggctcattcctgtaatcccagcactttgggaggccaaggggaatggattacttgaggtcagtagttcgagaccagcctggccaacacagtgaaaccccgtctccactaaaaatacaaaaattagctgggcatggtggcaggtgcctgtaatcccagctactcgggaggttgaggcaggagaatcgcttgaacccaggaggcggaggttgcagtgagctgagattgtgccactgcactccagcctgggcgacagagctattgggaacagtcagcacaaagacattaggatctttagaaaaaataactctggagaaagtagtagcaaaccttaaaaatctactttgaagagcaaaatttcctattatttcctctcatcgttcttttcatagtcacttcaaatttccaggccttcctggtgttaaatgatgttaaaacacgtcttttctacctgactctactgagtctctaattgtattcaagctaaatttcatgtacaagttcaaatgatgaactaggaggacacatctcatagaactgagagtctaatttttttttagttgcagtaataaaatagctgctcacatttatttaagcttagtaagagccatgcgtggttctatgctttttacatgtgtttcttcttgtaatccttatgatattgagcacagttgacattccctttgtaaagacaaagaaaccaagtgtcaagaagtttaacattttccacggccacactatgaggaggagagacggaactcgagcttacttagccgtatagcagatgccgtcaaaggtacctttagaacacttgagtgtgtgaaagctaagggaaattatttctatcataagatactcactgtctacctaaagaaggagctagttttcacttttttgaaatcattttttccttcaatgtatttaaatcattaagaaatctaaaaatgcaattgtctaattgttctaattggagcagtcctcacaaaatatgttggtgtggtgaaaatgtgtttagttcttcagaattaaatattctgtagtgacaaatatacagatcaaatcatattgatataaaacatattaactagttggccacgcgtggtggctcacgcctgtaatcccagcactttgggaggctgaagcgggtggatcactaggtcagcagatctagatcatcctggctaacacattgaaaccccatctctactaaaaatacaaaaaaattagccaggcgtgaaggtgggcgccagtactcccagctactggggaggctgaggcaggagaatggtgtgaacctgggaggcgcagcttgcagtgagccaagatagtgcactgcactccagcctgggcgacagagtgagactccatcccaaaaaataaataaataaataaattaaatagttaacacaatgttatcacaaccatgcattttttacctcaaataaattatcgttacttcctatacaaagcaataaaaccctgtaacacgcacacacagagagttctgtgtcaccagtgacagctctcagccatctcctgagcttcgaggttggatactgtgcttatccagctgcctgggtaatcttaagtttaagcccagaactttcctagcatgctgctcttcccagagtgtagccacaagggctgtgtgcctattacattaggagagaatcagtgcctcagttgcacttagagccccagcaaggagcaatagaggcggagtgagatggagaggcaggtctggtcttgtgtgtgtgggaaggaaggagtttgtcaggcgaggaggctttcaagaggcctgtgggcctcctgggagaaacactgtaaaatgaaaggagaattccttagactgagctctgccttttgggtgagatattgaaatcctctggacaaaaataaatgagagacttgaatttgtgaactggaaggtcactttgaattcaaaaatcttatctagccaggcatggtggctcacgcctgtaatcctagcactttgggaggccaaagttggtggatcacttgagatcaggagtccaagaccagcgtggacaacaggacaagaccctgtctctgcaaaaagctacaccaagtgagctgagtgtggtggcatgggtctgtagtcccagctacttgggggctgacacgggaggatcacttgatcccaggaagttgaggctgcagtgagcgaagatcgcaccactgcactccagcctgggtgacaaagtgagactgtctcgaaaaaaaaaaaaacttattatctatctgtactttgcccagcaacatggactagtatgagcaacttgtccttttcttcaatttttttaaatttaacaattattatttcacttagagaaggttgacatagttagaagaaaccaaacaagattcaagcgtgaacaccatgatgcgtgcatctttgcagatatttcccatgtgtgtacaagtagcctgccttttctgtacctgaaaatgggatcaaaatatagatattatttgaaacgttcaactgaaaacgctttaccatggaaacacattcatgaaggcagtacagtgtgtcatacaacaatctatttggccattttaggatggtaaacatttaagctctgtccaacttttcagtatgagagagggggctacagtgaagaagcccctactggagcaggatgtattaactctctagattgaaacatctgataatttagaatttgactgataggaccgaattatcccctcccctcatttttctagatatccaacaagagtataagggagtgtcctctctgtgcacaaccaaaacctgatatcatcaattagagtttcacaaatgcactggggaaaatgacaatgtttaatgcactgctttcaatcaattatacacttgggaatcttttcctacatttattatttatgtttgttcttcctataaaatacctatttgtacttaatggttgctaagctctttgctgactgtgagatgatctttttatattacttttctagaagagtgtgtggtgaacagactcttagggggccatgcggcacccccacctgctgatgtccgtgccctagggatccttttctccttgagagtgggcaggacccgtggcttcctttcaaccaacacagcaaactgacagtgataggctacatgtgattatgtgtacaggattatgtgattacatatggaattgtagcactcaactgtggagtctccctctcaccctctctctctcccccaaccccactcctaacctggtttgagccatgctaggaagtcccaggtgacaaccgtgtgtggcccccaggaactgatggtaaactctggccaaaagccagcaaaaaacttaatgcctcattcctacaactgcaaggaactgaattctgccagctgcccaactatcttagaagtggattctaccccagctgagcctcaggtggcaatgaagtcccagccaacacttgatggctgctttgtgagaccttaagcagagacccagctaagctgccaagccatgcacagacccctgacccacggaaactatcaggtaatgcatgtgtgctgtttgaagctgttgcgtttgcaataataatgttacaacacagtagttagctaatgcaaaaagtattcaaatgggagattgctcccccaatctgtccttctatgtagctctgttttctagctcttgagttgttcctggtggcatctggtcctgcggagaggataaacctgggtaacagagaatgctataaaattatcttgctacaaatactgttggctttctgtctctctccctcatttggagacaaagaacgggtattgtcattaaaggcattaaaaagtggctcaaatctcttcttctgattttgaagctacagtaaatgacaccacatctttaacttaggtacttctttctttctcataggttctattcttaaaatataaaaggtaagaagaaatgatagtcacttcaacttgtcatataacactttacagtatttttatatggactctttttaaaagacctatcattgtccatccatcataaaaactgaaagaaaaacacatttgctaggagatatagatcataccccaaagttcggcttggctatactttttatactttcagttccgtagacgcctcagcttttcaacaccctgacgacatgccccttccgtgtctcttgttgccagcaaagaatgcaggaaaggtaattttgtaactgcagttgtaaaagaaagagactgattagctcttctttgttccataatcctctaatgtaattctttaaaattaaaaagcggagagataaaatagtcatgaagatcaaaatgacaattgaaggctggcatatctgctgaacaagctctaatattaaattattgtcaccagaagaaaaaaatgcaaacatctcagataacttactcagtatacaaagaaaaacagtcaagaaacagaaacacaattgaatcaaataagcatggcaaaataatatcttgaatatagggtttcaaagctaattatgttgacaagttctagtctcagtacatgagtcaataagcaggcacagtgactggaagaaatctttaccaacaccttccctaggtcaactcttcaacgagtgttttcacaaaatgttgatgacaaattaatttgaactcactaaaaataatggctggaatcaagtatattacatagactgagaacatttatttatttattaaagaaacagtgaatgtgtaagaaaccagaatgatgcttggatacttgcaagagtgcccttcagttctccaggactttaagatttatgaagtccaaacaatgtaaacaaatgaatgaaaaatcagcaagcaagaataacactttttgttttttgaaatggaatttcactcctgtcgcccaggctggaaggcagtggtgcaatctcgactgactgcaacctctgtctctagggttcaagcgattctcctgcctcaacctcccatgtagcttggattacgggtgccagccaccacacccagctaattttttttttcgtatttttggtagagacggggaagaacaacattttttaaaggaccctaaacctacagtttcctacatcatgactaataatttttaaacatagtaactgacaaaaaaattagatcaaggagagattgggtgatcaacatatgatagaactagaagtggactcaaagatgggtgggcttgagatacatggaaacaaagctcaaagttatggtcgatgaggtggaatagaaaactcctcaatggcgagaaaactgaaggtatagttagggtgtacctggcctggctgaattggaagtcacaagggcagatttgaaaagactgattatggaggactttgaaagtcagtttgggagagagatgctgtaccctacagagaaaagcatgtacagtacttaagaaaacaagatacatggccagtaaatcaaaaactgcttttctttccacactcagtgtcctgttggtattacatcctggaggtcattagaaaaactccagaacagcaagagtaaccatcacaggacttgaagggaaaatgtttaaaaatgtctaatgttctagcttccaataagtagatgatgttcaaacaaacatatgaccccttggctgcatgagagtagaaaggagcaaggcctaacataagttgcatataaatctgcatatttcagggactagtcccatgacagtagtgtacgcttccgatccgaccttcagctttaaagagcaatgaatcaatgtctgagaagggtggccctgagcatcagtgtttataggaccatttacctgcttgacgtttcaactggccctcactgagctaatgaaaaacacaaagttttcttgtctgttctccggctgcttctcctcaacatcctcatcttcagttcatgatgttgttcctgttcccttcctcctccattatttgacatagattagggtagtcatagccttttgtaaaggggaatgaacttgccagatagatggagagaacaaaccacttgactgggcacaaagcacaaccacttctatgtgggtagaagatcctgcagcaaggaggatgaacagcagaaggaaaaacccccagattcttgccagaacagaaacccatacttagtgtccttgggctgacctgttctaactggaatagtaaaaaacacacccctgggtggagatctaagatgctagtgagccatgtgatatatgtgctagcatgcagagcagtggcacatatgcatccggaagaccactggcaaagtcaaaatggaaactcctagaaagcactcagagattcatcctctttgttaaaaatgtgatgtagccatggaataccatgcagccataaaaaagaacaagatcatgtcctttgcagggacgtgggtggagctggaggccattatccttatcaaactaatctaggaacagaaaatcaaataccactgttctcacttataagtgggagcaaaatgatgagaacacatggacacatagaagggaacaacacacaccggggcctgtcagagggtggtgggtgggaggagggagaggattaggaaaagtaactaatggatactaggcttactaccttggtaatgatataatcggtacaacaaccccccatgacacacatttacctatgtaacaaaacttcatatcctgcacatctgccctggaacttaaaagttttttttaaaaaaaaatgtggtgtaggtgaataggaagggcccatgcgttacagttatactgaactgagtgattctgtttggcacatgccataattctttaggtgagcaaaattatgagtataatccttttcaagagtcaagtcttcccaattctcttcctatccccagtcatcattgttaaggatcatatcagactaaaaatgtgtatatcttccctaaatcacagtagttctacccagatcacattaatcaataaaactaattccacctaacagtaacaagatgactattctcacctgaatttcccttgatattatttatattttttaagtatggggcattacattcaaaatctgtattgtttccatgtaaaatggagcatggatgttgaacaagtgaactgcaacctcatgaatatagctgaaaccataagacaaaaacaaaataccctcacagatggattggtcttatgttgtccacaggaattctattttatgaagaaaggggaaaagagacacaacaagaattgcaagacatttggagtgcgcagaaattgtctgatgaattgttagtttcttgtaaaaatgtgactcttcttagtttgccaaggtctctcttctttttgtgaagtgccgatcatactctgcaatgctcgactatcccagctgtattatacatcaaagtacactactttcctaccaaataaaagggatagtttgaaatgtggtgactaaaattgttgatggactttgaacattcataaggcccatcctttgagataaaagtgaagatagactctaacttcagtggaatccaccattttcacaggaagtgaaaatttactcagagcgccgccaggaaagattttaggaaccacagttatgtcactaactatcaaggaggtgtaattttatagaaaagggaatgatgagagtccccgacatcctttacaggaatatcaacttcaggtagaagaaaattactcatttgttagagatcaatgaagacactttctgttaaaaaagaagaggaggaaaaagtttctctaaatagaggcatagacattcttcagtcatcttgaaaatgactgcctgcaatttataattaatttcaaaggtttttcattcatcagagatcactctccaaataattcaaattttaatctaacatttagccctttcttatataacacgaatgatatcagagtatactaaacagtaaaagaaaaaaaataattcactcgaacagtatttttatatgaaagagcataattatcccctgaagtctccccataatataaacattatggacaaggagcttgaatctctgttttgttgtaaaactattaaaaaaaagaagattagacagcattgaatgatggataccgataatagaggcactgatgataaagaagaaatcttctgaattaattgcacaatttcatagtatagtatattcttcatgaaatcagtgtgagctaaatggtctgtgaaagattagtgaaaacgttattagattttgatcacttttattgaaaggaaggtagagagatgacagattgatagactctacctatctatatttaaaatatataatacatagataatgtttatatacagataaatgcatatagtatacatcaggtattacacatatacagatatatccattgcatttttactatctcaaagttagaagccatattttactacctagcacccaatgtggcattccctaagtgagattacgtgtattctctgtatcagaattacctgggatgggcgtgggtagaaaataaatagatttctacctccatccaaaatccacttattcagaatcatttggaaaagaagccatggaatttgcattgaatcaaaattgaaacaagtaattcttaggcacacaaagtttacatagagtgttcaaaaactgtgtgtcatgcccaccctgactttgacagctataatgataacggtgacaggcgtgttcagtacagaaagcagagggttgctgcaacactttaggaaaacgctcagtgccttgcaaagttgctttaattccatcggggttcatggtttataattatctgaataattcagacaaaaagttgtagttatctctatcatatccacatcatattagtttttcttgaatttcattgaggttgaagctccccaaaatatatcacgccaaaaagtaaaaaataaaaagcactggaatctgactgatattttatataatataaaatattgagtgtcaacatgattggattggaggatgaaaattacggttcctgggtgtgtctatgaggatgttgccaaaaaagattaacatttgagtcaacggactgggaggggcagaccctccctcaatgtgggtgggcaccagctcatcaactgtcatcttggctaaaagaaagcccacatgctgagtcttcaggtcttcatctttctcctgtgctggatgcttcttgtcctcgaaaatcggactctaaggtgttcacctattggactcttggacttacaccagtggttttccggggtgtcttggactttaggccacaggctgaagactgcactgttgacttccttgctccacagcttgctgacagcctattgtgggaattcactttgtgctcctgtgagtcagtactacttaataaactcccctttatatatacatttatcctatttgttctgtccctctagagaatcctgactaatacagtgaaaaaaactgggaagagacaccaacaatttgactccttcatgtttatgttcttgatctcatgtctattataatgatagcttttaaaacatagcattatatgcattactctccgctttacaaaggatgaggcaaacttacattaaaattataagcatcaagtatcaaattatgagcattaagatgcaagtatcaaagtatccaaggatatttgggtggaatgacaacactgaaatattcctttcccttttataacttttaccaagctaaaactagttcaggatttcaaccagtaaattgcaaaatgtatcagtaaaataaaatacgtaagttatttttaacaaaaaaatatgcctgcatgatcttttttcttttcattccccaaagaaattttagatggggataaatgttgccaccgtaggtcaaagtgacactgactctaactgaagttaatttgttgaaatgttattccttggtggaatgtttacaacacatttagagttggtggatgagacagggtgcctaatggatgacaaaatctctcatcttcatagaacaaagatatttgaagataaataaacattctgcaacttccctaaagcactgatggcattttcctctcccataaagtacaggttgatacaaatggtttaaagaaaattgcaactgagctcagaaaagagaactgtttcacactctgcatccaaagaggttgatctgctggagggaaaaaacaaggtgtgcattatttccataaagctccctataatcagtcaatttcagctggctcaattatacaatgtccttctattctttttcctgtaaagggaattttaattccgttacttaccaacctcagtatcaaggactaaagtccatccaaaatagacatactggttaatcaaaggtcacttaaggtcattttaaagtccttatggaaaagactgacttacttccttgcatttaggcatgaatacctaagtgcaattatttgatttttataccaatcagttgttctggaatggacaactagtttgctaagcacaatgatcatgtaattgaaggcaaggtaaaaaggttgagttccttgaggattaattcatttcagtagagccgaaacatctatttctatttctttggctcaggttgcatatccatgccaggtctacagtaaaaaaagaaaaaaaaaaatctgcccctggttgctgtggtggctgtgccacagcgtcagattggttggacttgtttaccactgctggtctcttagtccaagttcctactttcctatcctaggagacaacaggctggtaatatttccatacaacccaaagacacaaatactgtagactgtggaagatctccgcctttacacaagtatcttcctctgatttgttagttgatcaaataaaacttaaattaaaaaagaagacatacttgacctttactatgtgcaactacgcatgcaacttcttagttatcttacagagcgaagtgagctcaaccagaagacatacaaaaggccaaagggaaaaggtagcttaaattgcatgtatgcaacttgtaatggcttattttcactatgagctcagcagaaaaattaccagaggcagatttaaaattcagcgcaatagagagtatttaatatgccatttgcattttgacagcttagaaacgtcttcactgggtttgctgtatcgtctgcttataagcacgaaccagccaccgagctttgtttatctgtttcttaaaggaagcagaaccattttcttgacatttttaaagctgggttggtgtttgcttgacacaataaactggagagtaaggaagcattgcccccgggaggagctgctttcgcctgtagaagcttcagcactgtggttgtggcagtcgtcttaccaagcatgattggccagctgaaagccaatataaaaatagccattctctctcttcccgaggcctctgccagtgagatgcttgagacatgggggaattctaccaccctgcactacttgccatttgcttctctggacttgtttgatgagacctcattgccctaccattcaagtttacaaaacctgtcacttccgaagaaagactcccttttgcgactaactacatgagtgctccagaagcactgaaaagctttccgctgaacagttctgatttgaagtcatagtaattagtaataatatcctgataatgcaacaggaaaaaaacatgatctgctcagcaatacagagatattaacttcattttaaggggttcacatttttttttttgagatggagcttagcttttgttgcccaggctggagtgcaatggcacgatctcagcctactgcaacctccacctcccgggttcaagagattctcctgcctcagcctcctgaatagctgggattacaggcatgcgccaccacgcccagctaatttcgtattttttttgtagagatggggtttcactatgttggtcaagctggtctcctgacctttgatgatccacccacctcagcctcccaaagtgctgagattacaggcatgagccacagcatccggcccacttttttattgctggatggggattaggggtttcctgcgaaagtatcttcttcacaggagtgtcctggcttcatcaggaggaagggtattgggtgcggctctgccataaaggagtctgacctgcaaattaaaggtcttagcatacttcttggtgggatgagtctttaataaggtaactcatctaaaaccatgcaggtatgggagggcgcacctctctcgcggtggagttacagggtttctctggaaactcagcagtgcgtgctcacatctctgctgggtgggtcaggaaatgtttgaattacttactttaacgaatgttccacctttctctttcgggcttctcaaaatgaggctgctctggcgtagtagtgttgtgtgtgctctcctttaggacgctttctgggtaagtaattgtctgcaaatacctgcattctcatggctgcacatatgcaagaaacaactgagaaggaaacttcttccaaacagccagtagatcagccccgggtaaaggggcagatacgagccagcatacacagaattaatattcctgtttaccagatgaaaatgcttacagccttactccttttcccctggtccctgaaaataggcatttaaagagaaaggcacacttgggattcaacctttacaatgccattaataatccagaagaaaaaggaaatcgccagtgaattttcgatatccccaacgctttattgaagagtacagcaccatcagctgaagctgatactcaagtacccacagtaacgggttccagtgacctcaactgcgaccgcctccagcctcacgactccgcaaacaggtcacgaattatgccccacgcatcaaaaactctgcgcctgccttcgccacagcgggagccgccacccgggcgcgcgcggcgcagctgcccacggcagtggccgggcgccctcctgccggagcgctcctccccgggaaagccctgctgcttgcaagcgcctccggtgggccctggagcgcgctgccgagccccggggcccagcgccgacgcccccggggggaggcccgaccttggtcacccgggctttgctaggcaaggggaacgcgacgccgccccaatggccagagcgcacaaacggcgactccggcgctggcgtcaccagcccccttcctgcctgcagccccttcccaggccggtacaggagctcgcacttgaccccgcaggcgtggaggagacacggtccctggtccctgtggggttaatgaaggagctccacggacccactgcctcgtgggccagacaatagcgcagtgagagctacgtccgagcgtcctggaccccctccgcgcgcacacacttgcgcacagcacctctccagctccatgcacgccaggggcctgggaccctgggctccacttctcggcttctacagccaggttctgggacctgcagcgcgcaagaggagctctcttccacggggctgccccgcagggcccgaggcgcccaggactttgcaacccctgccctgttcgccccagaatcatccagagcagcccccgcccactacctggccctccacaccctccctcccgcctccgcctcagcctcatcctagcgctgcagcccacccgcgtgggggcggaatccgcccggcacacacgtgtgcggattattaagcagccgagctagggccgccgcggtctccacgcagcaacctctgctaattgcgggggaaggcagccggagcgtgcggaactcgagggaaccgagagtgagctcagaggctgagttgcctgcctggaaaggaggaagccccgggcccagttaggcttggagtgcaggggaaagggcgggaagttttgcggagttgcgtggcaggtgtttcctctccacgcaggggctcggctggaaaaagccaggtcctgtcccttgggctcctgccctcaccccgctgcgacacacacgccccagcacacctcacagggcacaaccctcttttccctagactttagctgcctcgccttccaattcccagccagtccagtgctgaccagaggccgctgccagtcgggccctgctcagcaggcgctgcctccgcagccggcaatgtcagaggcaccggccaaggcatccggactgagccgggcgggtgggcagagggtcggcgtctgcaagaagctccccagtcccgagcgaccacgagcttgggtgactaagacccactgtttgcgatccccgagatctcggggcgcattcccgcagacacccccttgtgagggtggatgccggtgaggaggagctggtgctgagcggtcagctttcacggagccctggacgccccgtggaggcaagtgcagggaggggaagcccaggcggcacgtctctcccccgctctccaggcagatctggagtttcctaatgaaccagatacagtcctccttcgccctgccaatcactcttccatctggaccactggaggaaaaggaaatgggtggaaaagaagatggaagaatctagagaggacggggaaatattatgtagggaaaaaagcaagtgaccattgaaaaaaaatcgtaagattggactccaacctttaaaaatgaaacgaaagaaaaaccctttgtagatacagatactcccgggaacatctatggaagtgctgactgataaagaaagcatctaaggaggctaaaaatgaggacaggggcaggtatttccaatgtgaaaaccaatcagtattctctctctctctgtctctctccctctttctcgccctgtctcaaaagggagcttatgttctttcccggagaataaacaagtacacaagctattgccagccttgaggtcgcagcctgtaggctacttagaagaaaacattccccaactcattcagggagaaaaccaagctcacagagccccaagcccaggagccacccagagaaactccttcccctgaccagcgtagaaggaggatacccgtgcgcccacagtgaatgtatctgacttggaagccggtccagaactcctagcctgtttcacgcaccttgccaacaccttacaacttgcaaggagcgaagtccgggggagaggaaagcgggggcgaccttctagaggcagctactcctcgccggctgaggacgttggagagggaaggaggagaggaggaatggggtgtatgggtgcgaggaggccgggccggcggagacctttgcctattggtaccaaaacccccgtagagagcccgaactttccaggccggcttcacccgggacgctttcccaggcgcgtcgggtccggggagaaagtcctgggaactgcccctcagccaccccgacccgtggagtccacgtctcggaggaggcaacaccgccccggcggagcacagttccagcccaactcgtattgggttcctttctccttgacaccctgtactgccgagaaaaagagatctctcctgtgagcccaagagagggggaaggaatggcggggtggggcgggggcccaggagggctggggagagcgcgatggaagctccctcccgtgcatcgcgttccccgagcttcggcgatggagcagcgccgggcagaggcggccactccgtaccctgcggtccccaaaacgcacactcgcgtccgcacacggggcctccgagggctctaccgcctccccggccaggagcaagtccgtcttacccttcgctgcagtgaggagcctcgcgcacagcaccagcagcccgagaagcaggagcagcgactggaatctcctccacgcagtcatgtctgcagatactccacacgcacgcgacaccgatggctcctccgaggaaggcagggctatgagcggagccaaataatcacccgagggcaaggcgagccggagagagagcccggtcccaagacccgccgcgcatccgacgcctcctgaaggtctgggcgcccggctcgcttccctctcatagcatcgggtcccgagccactgcagggctgagctgctccgagcgcggagacccgggctggcggggccggggccggggacgagcgccggccgagccgggcaggaaggcaccaaggcggcgaggctgcgggagggggagaagcggggagaggagcgcgcgcagccaggagagacctggagaggaggcagctggagagagagccagcgagtgggagatgcggggaggggggcgcgggggggaggagagatccagtctagagagaaaaggcggagagcgcagaagaagggctgctagtggcacaaggagccgctgccgtggaggctggactcaaccatccttacccacagagaggggaccgaggctgggcacggcgcagtcccagacagacagagcccagcctcggggcctcgggctgcccgcaccgtgctgcgcttcattcggcctcagcgcagcagcgcgcaggctggagaaaggagacttgttgggcgctcgggtgggggaagctcacgccgcacaccggggaggaacaatgtaatccggcaactccagcaaactggagggtttctgcaggggcagagtcccgcctccatcctttgatctcccttccttgctgaccagagagcagccccctacctaacttagatcagaaatgcaggtggaaagggcacaagcttcaactccaagggaggaatatatttatacatttatatatatatatatatgatgatatgtataatgttttgcaagatggactatttgcaaggagttacacaaatttacacatttcctgactttggattgtgttagatttagccatgcccaaacttcagcttcagataaaacgtgacatgaggaagtctctagaattaatattatggtctggttgtgagagccggcatgttggcacagcttctgatgaaactatatataaaattctgtgggttgggaagggaccttaaaagagaagagacaggttctccctgattctgcaaaaggatgaagcccgcagagagagaacagtgctttagaatagcagtacttgatacagtaaactggatttcacccagctccccaaatagaggaggcattcctgcagttcctggggaacgtgtaaggagagacattttaggagaaggtggtcagttaatagaaacaccacgagtgagggctggtttccatagaaggacatttaaaggattcgacatccttgaccaaaaaggtttagccctttcagaggacagaacgtggaaatcccataccctagtaagagagaattagcctccaggcctggaaccattagagtatacaaccatctacctgcggtatccccacagcaccgaatgcctgtggtgggagggacagcccaccgcttcatcccacctgcacttcctctgtcagtctttgagattaaatgggttgacagtttgataaagttttatatccctccttcaattttcttagattgctcctgcctctgtgacctagtctaccctagaaaggcataatggatccaggaaggactgcaaccttggcatggaaacaccgaagcctgactttcttagtctccctgcagcctaaggtgcaggtggccacaattggggccacctccacaacccttttctcctcgcagatatatgagatttaaatatggggtgggtggggagggagagaatgcgtgctcttggagttgcagtcctgaacatgacttggat

SEQ ID NO: 133 - DNA, 15711 bp, Homo sapiens
  source 1..15711: mol_type = genomic DNA
tttttgctgtaaaacctagattgtcttcatttatctaaaaacagagaaacaaaaactaagaaccctgtggccctagatgggagtaggcaggcctcagtccagccatgggctgagtccatgtggtggaagcctgttgggacttcctgccagagtactggagctgagggctgccacccagaccaccaggccaatcagagtgaccctgggaacccttgaagaacccaggttttggattgtgcttgctgaagtaatcgctacagaagggtgtctaggcaccagtgaagaagagacaggacaactcaatgtaccagggtactctaacctgagaagcctattcctagttaagctggttacagggacatactgccgcaccataggccagactccaaactatgagtcctctaatggcactgatatggccatgtggtcatgaccatgcatgtccagaggcaagagacagatacctgaagggtgacaggacaggcaaaaaaaggattaaacattcagagaaagaatggcagaaacatgaaaatcaatgcaagttgcaaacatacacaggacttgcatgttccaggcactctttaagggctttgtaaatatgaaataaacaagtttatgaggtgagtagtgttactgtttgcatgtagtattgaggacacccaggcacagagggagtaatttgcacaaatcacctcactaggtagcagaaaatctgagattcaagcccagcattctggctctgtgctcttaccagttaagccaaagagatgagtgagcccagtacagaccaaggcagagaattagagcaaggagacccaaatcagttctcctctggcggttcctccttccagctcttgtacaaatcactatcattcctaagggggaagtcaacctttctcaggcccccagactggggctccccagagcagggtgtggcctactcctctggcctgctgcccagctgagctgccagggacaggtcagacaggtctggctggtgcagagggatgaggttctgcagcttccccctgccctttccgctgcccccctgctcaagtccccagggaccacagctgctacgtaaggccatcaccaggccttgaccaggcacatgcccttaccctgcctccacccaggttggtgaattcaccctcaggacaaggcctcagctcagtgtgggtgtgtaggaagaagggtgcccttacccatccccagcagatagccccatgtcagaagaccctggtgctgctcctccccaccaccccaggtcaccactgtagaggaacaggttactccaaaggaaaaactgctctatctgcctggccagcctctcagctggcttcctgcctccaacttgactggcttgcctggaaagaggcccaatatgctgggtgtgcctactcctacccctcaacacagcctgtgtccatactcccctctgcagggcttgtcccccatcccctttgcccctgcttcccaccccacaaatacataccacattgctaaaaataaagcctctttattggtacctgtaagctcaggtacaaggtgttcccacaagcacacaggctggcaaggcctcctgggcaaggggcaggcccagagcctgcgtttcttggcacagacacagagagaaatggaataaattatagttctgacactcagggacaatgtagaaattatgatgcaaaattaaacattagcaaacaaagggtataaaaaccctcaggagccacccctcgccaactggcctcagggcatgggcaggtgggccacgctgaagtgcagtgcccagaaagccctgagataatagtctggggcatggttcgcgccccgaggtaggccctttgccctctctgggcttcctgtttcctccttccccctcctacatccctgggcctggaataaaggctgtggcctttgggaagggggaagatggaacagagggcaggaagtggagggggcagggtggggcagaagggagttttggtcacagctgttcagcccaggctctccccctgcctagatgatgtccttggccagcacctgcccacagagccatctaggagccaggcagcagacatagatcacagagctcaaatccacacctagtctgcaccaaagcccaggcagggcaaggtgtaggactacaaggcaaaaggggctcttgagggcctgtgcccaccccacccctggcattacccaccagccaaagaagtgcaaccaaagcctcctcaatctccaaataaattatggaaataaattatagtcttcacagtccagtggatttagccacccatgggtctagggctcagggtggcagaagccacctgatttcagccctgtctcaccgtctttgggctaaggaacatcacgcaaagaccgaaaagtggtctgccaagctccagaggagccacattttctcctcttccaggctcacgttgtggagatagaagagcaagctgtgggtgtggggggccgggcagctgaaaggggaagccccctccccccagtcctctcttcagcacagaaaagttaaaacaaataaataaatccagagaattgtttgaaaaccaggagtgtgcacatggcacctgtgggtgagccagccagtgggagactgttacgcagactctggggagccccataattacaagaaagcagcaacaggtctcttggggctgggaaaagacatcctggtcctcacaccggcacaggctccattagagatgctgggacagtgtcctcaaactggctgtcaataaagggatctagggcttcggcggctggctcggagaagcccatgagggactccaggaagcaactgctggcatccccaggtggagacaggccaggcagggggaagtgaggtgcctcgatgttgtccaggctgtcagacaccttctgtgatgtgtagtgaggccccagactataatctggcagagcctggagtaactcaaaggagtcacaagaagacaagctgagatccactgagctactccggccagcgtccatgctgggtggcactgaggtgccaggaaggctgccttcccttgacccttcaaggccaccatttaggaagcagctggcatccaggttggcattctcatccaggacgcctgatgtgaagctacagccagaatagctgtgggtccagctggccaggccaccagggtcactagtaccaaagatgtcagctggatggaagcagctgaggttgtccaggttccccacgctcccttcctcctcttcctcctcctccccaccgaagtcagagtcactgaaactcaagatgcgtgccaggctgtcatcatcaacgccaggctggaagccagggccaggcaggcctgggtgggtggggcagtcaggagcctcactagtgcccgatgctgatgaagatgctgtagaagaatcagtcatgtcgctgctgcagctgttgtctcccagctcattgttcatggggggcttggccagtgggaaagtagggaccagggcctcctcaccagggctgggtgggctgccctgggcaggggcctccagctccctaaagctctcagcctcctgttccaactgcaggcgggtgagtgtgtggatgaaatgggtctgaactcttgcctgattaaattccacacggcccatggggttctcacagccctccctgcagcagccacaggggaatgctgtgtggtccatctgcagagaaaagtagaggtacaagtgagggttctgtggagtgcaaagaagtccccacgctcaggatccccatcccagtccagccaccacacctggcacttgatgcctgccaggctgcagctgcaggtctcagggtcgcagatcctatcgcagtgacagccacaatcctcccgggattggcgcagtgcctgcagctcccgcttctcctcccgatcgatccttcgcacacctgaagccctcagcagagctcgacgtcgccgggctgggtagggctgtaggaagctcacttcttccaaccggccacctgccacagcgactgccaagtcctcctccacagaggcgtcatcaatggcatccaccacaggtggcagccctgcctctgcctggggtaccccagctgccgaaagctgcatccacaggaaagagggatgtaagaagcacagacatggacatgggcttagccctactgtcactagacaaaccctccccaagtgcttacccccccactactcgtgcttaatctgcgatgggcactgtgtgtcagacagtgaacaggacagccaagaaaactgccctcagggcatttgaaaaaaaaaaaaagagatatcctactcatggcattccctagatcatggacagactccctttcctaaccagacagatacgcaccccctccagttcatatcaacttcacatccccctctccaaaaagttcagattcaggtatcatgcccccagcccctgcagcaaatagacacgagccctcctctgcgcctcctgttgcagacaacccaggcaacaggctccaatcaagccaatcaccaggcccacaggcctgtttccccataaccataatgagcaagtcagcacccacccctggtacgcccacccctcaaggttaggactccaggagctgcctcaggaggtgcgccacggagaggactctctctaccttccactgcagcatctccaacttctcctctttcaagcgctggcggagcttctcgtgccgtgcacgggcttgctcctgcgcaaactcagccaaagagaagcgacggcaagcactgtggcgaagggccatacccagagtacagccaccacggctgggcacactggtgaagccctggcagcgggggaagtagaagacggtgatcccatcaaaggctacacggcctgggcgctcccggcgagcccgcttcaggatagacagggctagaaagcaggcaaagatgggctggggattagttttcagtgaggcacaacttacctccaaaaagatcatgccagactgccctcccgcctcccaccttttccctcctccctctccacccattttgaaaaaagaaatgtgaatttaggagcctgtgtggttgggactggagcggctgaaactgaataccacacccatgtcagaactggcttattgttatttaccagtccaaatgacagtattcgtaagattaaacatctttcctatgtttattagccatgtacaggtcctttgtacagttttctattgttttttattgatttgtaggatttctgtgttttgcaacaggcttaaaaaggctttccctttacaagttaatgtttattgattagtaagctatgtactggtattttcattaggttgaaccatagcaaattaccatgtaatggtcaaatattggaaattccatatatttcaacttactatattaattttgtacccagctaccagagggaattcccttctaaaaggttttctgtttatactgttagattccatgtgctaaaaattatattctttttatgtgtaatgcacagatatatacctacagtacataaaaaggtaaacagcacatctattgtattaaaatttcatggtgggggataattaaggagaaaatgtctaaataggcttcctggggaacaataatgaaaaataaggtccagaaacactgctctagggccatgttcatcagtctggaatcacaactatacaagcttgaaaataaccaggaaaaaccccttttcactatgttcaggcaaaatggacagcattttgacaggagagggaccggcttgacaggccccgtggcagagaagcatggggcgggcggggaactccagcagttccatttgtaggacggtagggtgctcattggagaaacgaaactggaacagaagggaggggccagaccgggaaggccctgagagcactctgcagagctgcatcccggatgtcatcactcccaaggtcaaaggtgaattagctgggctcaggtgcccctggacagtggacactgagtgaccactatattatagctcatgagagctaccgccatggggacctaaccaccagaggccaaaggcatttggtcagggacttctaaatttcatctttcaggaaggcaggcaggtgatggagttcccaggggagggagtactcacgggtgaaacttctggggccgcagaagtcacggtcaggcaggggcatctgatcccaggggccttcctcctctgagtcccaggcacgggagacagaagagcttggggagcaggagcgagactggcacccagaggaagaggaggaggaggagaccgaggagttgtcctcatccagctggtcaaatttcctcttcaacagcccagtcatggtggtgccggacgtgctctggggtctggggacagacagcctggaataggaatgagaaggctctaagtggcaggcaggcagcagcaggtggacttccagccaggatcatcatccctcccacttaccctccaaggcatcccagaccctggcctctgccctccagccctgcctgtggagctctgtgtgggggagggcacagtctccaggaggatctctgcacaagacacagcacctccctccctccaaactaatgtgcaaatccacagcctgatgcttcaaactcccacctctgcccaaagccttcccaggcaccaggcaccttccccactacctcctacaacacacacttacatacatacacaaaacacacacacacacacacacacatgcatccacaccagcaggggaaggaggcagacagaccaacagatggactgacagacctcagcctggtctcactcattccccgacaggaatcctggcgctgactcacaggctgggtgattcacacagcttgcatctgtgtgcctgtgtgtgtgtgtgtgtgtgtgtgtatgtgtgtgtgtgtacgccctacagcccgcacagcccgcacggccctggtatggtggctctgcttcctcctcctcctcctccagcacatccaaacaggcacgccactctgcacacaggcagggctgcgggcccttgctccaggctagccaggcactctggggaacaggctggctttgacgttggcctccattcctagacggagtagtttctgagcccttcccctcccggtgtgggagcttctcagactttcccttagaaacccccgctccactgtcaagaagtctcctgcctccaggcctgtgtgaccacagccactaaggctgtctctttaacatctcatttgatcctaatgtccaaagtctctcctgtctgtggcttcgtgacatggagcaccccacaacacaacactgtctcccaagtgagagtctcagccctcagcagaagcataaccagagactcccacagctggctggccttatccaagcagaagagacttggggctcattccctggaatgcttcagcaaataagggtccttcccaaggtttggcaagccccagaggactcaatcccaaaggctgagtacagctaccttgtgtctgttgctccagctgggccttcggggaggtcaccagggggaaagggaaaggaagttgaagctgaggccgaggccccagtgctggggaacccttcccccactgccatcacaggaaatgagagagaacaggaaaaaccaaccagaaggctgtcttggtctcctctactcaggtgtcctttccaaacactcctttgccctcttcccagccgcctacaaagtccccgaatcctgtagagtttgctgtcaaccttactaactggataatgtttaccccagggacagcctcccctaggcaagcgtgagagaagcaagaaaatctccctccccagccaatcccccaccctgggcctgggggaagactcacagatgtttccgggggcttctccgtgggtagtttctcaggcttggcacccccctcccagggtcaaaccacaaacaaaaacaacccagctcccagctgaccagcaggttctcccaggaggtgggggattcatgacccagaggcaggcatactcacatgtacacacatgctcagacaacacggaaacacacatatggacaaacaacacccacacatcctgtccccatcgcatcctgccaagagaccccatcctttccccagttccagatgccatctacagggccctgaatgcctccttcaccacacatccagcctgagatcccccaggacccactgcccacttgttatctccgcccaaccatcccctagaaacataaaattctgcaggccccaaatcgaaccccttgtgtctgttccccaccccccatgccatctgttcctcttcctgtgttccctatcttagtaacagccccaccacccacccagtcactcaagccagaaacctgcagtcatcctcaactccttcctctctcttcctccatctatatccaggcacgccatgcctgggagttcatgtaaatccgtttaatccacacagagccaggaacagacccaggaggtatcatggaggccacgtggccgtgttaagagcttcggctccaggaccagactgcctgcttttgcatggaggccacgtggcagtgttaagagcttcggctccagaaccagactgcctgcttttgaactctggctccactgttacttggctgggtaatcctgggcaagttccttaacctctctgtgcctccaattctttgtcttaagacctcatagggttggggggtttagaagaatcaacacatgtcacatgttcttagattagtgataagtgctcagtgaatgtgttattccacactgtttaaaaaaaaaaaaaaaatgagctccagctcctggatgcacacgacacagatgcatctcacagacatcatgctgagtgaaagaaggcagacacgaaatacatgcaaatgttcaaaaaaaaaggcagaactactctgtgatgatataagtcagagcagtggttccccaggagagggagaaggacaccctggagagagtcatgagggaaattttctggggtgggaggtaggaagggctgggggacctgtaaaagttctatgttgatctgcatggtggttaaatgaatgtctaaaattgtaaaaattcgtcttatggacacttaagatttatatacttacgcattttatttaggttactatcaatttaaaaagttcactaaccttaacatgtctctgtccccacagtggccaccccatgtccctctactcctgccctctttccccagccattcttgatcctgcagccagaatgaccttcttaaaccacacatttacctgccactcccacgcctagaaccactctatagctccccttggggcattaggatcaagtccagaattcaagaagctgaagctgacctggccactgcttccctctccccaccttgctctctttactccagctgaactggcagttcccgtaatggccatgtccctgctcacctcctggcctctgcaaagctggaacaacccagccttattccctttcagaaagtcatctttcaaggggcttcctgaatcccccactccttcctcctgcctttctgtgctcctgctatggactgaatatttgtatcctaccaaaattcttatgttgagactgaatccccagtgtgacggtatttggaggtgggccttggggtaatcaggagatgaatgacaccttattagcacctttataagaagtgacacaaaagagatggtctccctctccaacatgtgagctcagacccagcaagaaggtgtccatctgcaagccaagaaggcagacttcatcaggctgactagagccttgatcttggacttcacaacctcccaaagtgtgaaaaataaatcttttgtttaagcaacccagtctatggactttccattatagcagcccaaaggaaaacagctcccaaaaaccctggtatttccctatcacagactatatctgatcagactgcaagggcctcattgctcatctgcctcacactgagggcatttctctctggctgcccatgtgcccatgtctaggacagagtctggcatagagaaggcacctgataataccagaggtaagcagaccagccctgcatatcgggtatagacccaactgcacaggcaatcttacccacatgaggctgctgagggcgactggtcagtgtgaccttctcctgctcctgtcacagttaatttaagaggggcaggaggagagtcacatgtctatcccccagctgtgccagagggtacaagcaagaatggtgctcaaaaagggtggctctggtggcaggagagggaagctcaggctgcaggcaggtgccaatgtaggcaatcccaggaggctccctggtcccccaagaggaaacagatggagagagatgtcaggaaagcaggctcagatacgcactgcggctctgcctaagggatcgccacagaaagagaacttaaggtgaggaggttatgacctccaagcctacagacagggaaacagagacacagggaagctacggtcatgctgcaggttctagtgatgaacaatcccctccaaatctgcagagcgggaatgaaatgagaaattacctcctccctgatactcctctggagaggcgggggaagtgcccctggttctcatgttcctctgttccacctcggaatccagaggctaagaggcagaggcaggagatgaaacaaaaagactgagccagagacaaggagaggccaagagggaatgaaacatagtgagaatctaagaaaagtgtcagacagtgagtcagaggtggggggaggggccctcagcagctacccaggaatcaagatcctgaccatggcagtgttcccagggtgagcacagccccctccctagggtcctggaggaaggaaaagcagttcccaggagctggctcagacagaaataccacaccgccgaggaaccccagagacaggccctgaatctgagagccaggcttcttctgggatctgagccctgacaatcaggcagccctcctgccaccacacacaggcactgacaaccccccactcaactggccacagttatccacacgctcaggtcacactgtgcaaatccaggaaaggccacctcacccctgggcaccaagtaaccaaaggctgtttttgagaagtgggggcggggcttgaaaacgtcacagcaactcctctgtccacctcagcagtcctaccagtgccccaggcctcaacccaagccagtcttagggagggggcacctttagctgcctccatcccccttcaggaatctgaagaatgtgtcctttaacctcagagccccaggccttggccagtccccccaaaacacttggggtcacatgacccctgtccctcaggaacttcctgggagaaggggagggcacctcccagcacctctagcccccactgaaaaaccagcctgggtggccctgagagggcagaccgaaagccttggcacctcctccccaaccatccctctgaaggagagctgggggaggggacggctcctcggctttggcctccaggacctggcactggataggtgccaaatgtttgctggctacatgaggcacttgttcctgcagaagggaaactgcacctgacaatgactgcttcctccacctaagtggggccttcttccctctctcattcattcattcaacaaatacacactaagctcacatatgtgccaaacactgtggcaggcactcgcgcatgcagggagcaagacttatacaactgctgccctcttgaagctctgaattgagcagggaggacaaatagagtggggtgctgggatggagggtctgaagggtgggacagggtacggctggggtgaaggtaggtctctccgaggaaggaatgtaggcagagttccagataggggctccgcatgggtaaggaacaggaggagggaccagcacagtgtgatcggaggaggggcagcccgcgaggctgagcctgggctccagggcaggctttacctcgagggcacggcaagccacagaaggcttaagtagggagtgacaatgccagatttgcattttaaaaacgtggctcagcaccgggagtggagggggtgtgaccggttggaggtgctgccagggccaggagagatgacaggtcaagggcataggagaaaggcagataccaagatgtggagaaggaagagggcagggctgtcaaggatttggatcgggggaggtgacgagctactctccaaaaggcttgagacttctgggtggaggtgctgggtgggcagcaggagacggggaggaaccctctggtgtcaggagtgtgggctacggctgtgtgtgtttgtgccgggagcgggagtgactaagtgtgtgactatggctgtggtgtgggcatctccacagtgcgtgcctgtgaatgggccccggggaggagaaactgaggaaggggaggaagtacgtgctgcggaaggaggagaagtgcgtgggagagagtctacgtgtgcctgcgggtggccggtgtagctgagcccgtgactcacagcagtggcctctgagagtgacggcgactgacaaacaggtgagcctacgacacaatccctccctcccggggtccgtgactcaccgcgcctccctctacgctcatccctccactccctccctgacccccgccggccgggggcgcccggcacacgccgcagctcccgcagcctccccgaggggggagcccgaggaggaaggcgacaaatgtcacctgctccggccacgcgaggaacttctgaaaagttctcaggcaactgggtcaaaaggaaactcacccgcggacgcacgcccccgtcgcctcgccgctcgcgcgcaagcccggctctgtccccactcgcgccgagctcggggagccgtgacttctctcggggttaccgcggcgggcgggggaggggagcagaaaacctgcgactcccgccggccgggcccccggcccccgactccggccgcggcacgccgtcagagccgggcagctccagcccccgcgcccgctcagggtgccggggagtgaacggcaggaggcaggagcggcagtgccactcgcgctgaatgccccctccccaaagtcccgtcctgccgggcccgaggcccctcggcgctcacctgcaatccggacgctcgcggaggacaacgacgcgacccgcgtcccggccggggacgccccctgcgccgcgactctgtgcgctcggcccggcagccgtcggtccagccgcccctcgctctgcgcgtccggcagcggcggcggcggcgggagactgcctgcgcccagccccgcccgccgctccgccctcctcgtcagtggaaaactccggggctcactgcgctgacgcacgccgggcctccagccaggccgcccggcagccccgccccggaggcgccgcctcctcccccgcctggagcctggcgcagcggcctgggggcctccctgcggactgtgacccggcgactgcgcctccgccgctctccgcccccagccctctcccgccagcgccctccccgccccgcttccagcacggtccctaaaggcgcggacgactcaagccggcagagccgagcgtagagatccccacctcgccccaccgccccagtttacagatgggtagaccgaggccgggagcacctcgtaactccgcaaggccacgggctagacagtggcagagccgacgtctcctgtacgctctccacccccacccctctagagggagtttattttattccaatctaaaagttcccccctccgcccccaacctaccacccacccccagatccgccggaaaagtaaactgtggctggagaggaatctggggtgtgtggggagcggggaggcagggagcgggaaggatggatgtaatcagtgggcctgaacttcattcctgcccacgggccaagagacccttccctgcagaagttccaaactaggggttcttagaactagcttccccactcccacctcaaccttcccttaaaaaaataaaaaggctggtttcttccgggccagatcttggccacttaaaatggtccactgccttctctgctcccgccaaggcctttcctgactcggggccaaccctcccggtacgacatgccccggcaaccaagtcctggcctgggagcccaccctcagccccacttcccaaccgcaggtacgagtctactcatcacctcgagcgtttccaccctcacgcttttactgcagccggtcttctcgactggaatgctctcctgccctctctctgcttaccagaatcccaatgcctttaagggctcagcttgcactgcctcctccagggagccttcgtgggagcctgaccctccccctcccagtcctgctcccgctgcattctgggttcttctgactgtcctagatgaatgctgtcagccactagcccagccctcaggattccattctaccttcctccaggttgggggtgggggtgacctcctggccttcttggatggcatctgcggtggagttgatggtgagagcccctcttcagccacagatgtgcatgtagaatggcaggggtctgctccactttacctttcctgcaagaacaacaggaggaaagcaggttgggggaagataaaggccctgtccttccgcatgcattgagtgtgtacctgggagcctgcaggcggaggtgtctgggcagctggagccaagcttccagtggcttcccagtaccctcctgatgaagtctcaactccttggggcctacaaagctgaaataatcggccctttctcacttttgcagtctcacctctctcttcataccctcatttaccactcccttccccccccttcaatgccattaatgtgtgtacgtgtcattttgttggtttatgtgcttttttttttttttttccgagatggagtctcactctgttgcccaggcaggagtgcagtggctcaatctcggttcactgcaacctccgcctcctgggttcaagcgattctcctgcctcagcctcccgagtagctgggattacaggcatgcgccaccacgtctggctagttttttttgtatttttagtaggtatggggtttctccacgttggccaggctggtctcgaactcttgacctcagatgatccacccgccttggcctcccaaagtgctggaattacaggtgtgagccaccgcgcccggccagttcatgtgcttttaacgttagtccttctgcatttggttttattttatacatgaggtatgattctgtcgcagcctcacctgtacacttccacctcatacccctgatgactgctctccagctctgttggccagttgtcagttctcagagtatgtcctgttttaaactttcaaggatgctgatcccaccttgcacctgccttgcacccacttagttgtgtggtttccttgtgcatttccttgtgctttgtctgtgagcagtgggagggcaggagcaatgttggacttgatcactgctctatctccagtgcttgataagaacttgttgaataaactaaacatgactagcaaatgggtaaagttgctagggctcaaggagagggcagggctggaggtggcagtggatggatttttaacacacagctagcacactgaagctatagtgtagctgagaatgcacaggaaggagcttaaaggctacaaagctgggtgtctgttgctagaggtgactccactctcagggctttaaggggtaaacccgcaggccacccaccctccaccacccacctcagacctca

SEQ ID NO: 134 - DNA, 176206 bp, Homo sapiens
  source 1..176206: mol_type = genomic DNA
ggctgtgaaaaccttaaagtatttgcttgcttcttgttttgtttagttgataatgaaatgtgtacaacctcaaatttgctgccagaatactaaaaatagaaaaatacccacaaaactgtcatgtctttagttctttccccccgaaaactcagtaaaaaggtgttcccaggatgaaaagatcattttttgctgcatgctaaatcttgcaggaaaaatgattttttagtacgattctgtagaaatgaatctttgatataatgtaaatgctgctgtttgtttcaagtggtgaatgtgttgttaaaaattggctgtttgctttcattttggccaataagtaatcaagtttgtagaaaatgttagcattctgactacttagcatctgtagtaatttctctatgtatagggataattttttagtgggcagagatcctgttctagttgcctgttaagcaaaatctgccctcccaattgaaaaagccaaagagaattgttagagggaaaagcatgtagccattgcagtctgcattgcagccagcgttgtccagagtacacgctcagcacttagcttctactgtgtgttgtggtctggtgagtgttgtttcccctgagcgctctattatttatttatttattatcaatcagtgaccctgaccacatagtgtgataggtgcagcattcttccctgtgggaaagaattaaagatggttccatttcctaggctacagacaggaatggggctctaaatggttttcatagactggctgttaaaggccaaaaattttggtaaatcaatgctatattatgctcttgaactattaaaacagccataattattgtcccaagatagaatatagtcctttttcaaagatgattatacgtggctaggtgacagacattaatgactgactctggagagtaagtcatacctgcactctgtggacttgatggttctttttctagagcaaacagagcgtggcattttgttttgacttgttcttccttggggtcaaatttatatatatatatataaatttttgtttgggcgaccaagatctaataattaaaacccaggtggaccatggattcagacctgcctttttatgtttttgactcttaggttcatcgtgtcccagacttcttcacatattcgtgaaggtaagatattctgtgtgcgcttggcctccttttcacgcatatttcattgcctctttgatgagtggttacgaagacgttaaactacctttttgttccctggggtaataggtcagtaactatgagcgccgtctctctccatgtgagcttgtgttaatagacacttttatggtagagttgggatggggccaccaccttaaaatgagtgagcagacaaggccaggcaagccaaaggctttaagacaccatgattttcttgttttgttttaattgggaagggaagtataaggaagagctcagagggagtttcatacctggaattgttggacttaattgacacttgcaaatacttttagtataaaggtttaattctatttaaaaagaagatccattaaatcaagctcttaactcatgggactatttgcaacacttctttgtaaatatcattttgtttgttaggttattggcaaaacagtttcaaggttcacttccctcccttgaaccaggtccaggtcattttgctttggggtagattaaagtcagaactctaaaagttgagcaactttgtttttttttgaattgatttagcactaacccaccattgcatcttaaggatggcatgacgtgataatgatggacttgtgtgaggttttgatttttcaattaaactttttgttatcacaggtaattaattgtcagcggtcttgagtctggttatggaaccctgtagtaacaagagctggaaattggctaattgacaatgcaattgccttaaacatctcaagtagagaacatttacattagtgagatgtacttgaatttcagaacttaacaaattttaattactttttattgaaaactgcactgaacgctaaatgtccacctttacaataaacaaatacagtaacggtaactcacactaaaacaaaacatacttctgatagccattatttttctgtttgggacaattttaaagtttttcttttgtcacaaaaacaggaatgtacctatacaaaggctcaaaataggccatctttttaaacaaaaaggcaatgattcacaaaagactatgaatagaacatgtaactagttgatacaaatctaataggatttgttaaaatcagtcacatctaatacatctgaagtgttcttgtataaaatatcacgtgaagaaaagaagactttatcaatgtctaaaaaagtgggtttgttcatagacaatctgacaagttaccataaaaagtgtttcctgagacataaggaaatgcaacattattcttcttgaacccttttagctcaagactttccactcaataaaatagcagaggatctgaaactgagaaaatatatttgagtacaaacagcttgtgaaacttaatacttttttttttttttttgcatcatcagagggttttactgaacttacaaccgacttgcccgctcagtatgcagttcagatgtgagaggcgcttctctgtacagcagcctgtactgtcttcaatcctatgcgtgcaggtgtctaccacaggcaaacagttttctccccattttgtagtaatgtgattttcctattagcaaaaagaggtcaccagcccctgtagacttaagggactcaagtcacaggatggggatttcctcttaatattttttattttgttgtttgaactcttgatgcaacattgtagagcagggtgttcaggacctgctgtgcccaagggactgataaaggaaaaagctctatttattctttttgtgatttgatgcacagatgaaaaacttaacacacaataacagaagttggtcgttaataaatcacatcctagtctttcagcgcttccgtaagcagacgacatcttcagttttctagctcttgtagtttcaacactgcaacatcaatgatgcatatgtccagaatcagttacaaagaccatccgattctttttctcttagttcatctatttttcactgtctcttggtcccaagtgtatctgagtgattaccttctggcattctctgctattgctcgttggggtgctctcgattgtccccgtgttttgtgggctggttgggagagggcgcttgggaaggatgtgccactgtcgggaggttgtgagtcactgggatgcctccagggatgatcccttccatggctgcaggaagtcctcctggagccacacccacgatgcctggcggatatctaaggaacacacagaaatagggccttgtaagttcagggcagagttgccaagctcttggctcttctacttctggccttttcataagagacaggagcccagtgacatgaacatggctcaccttgaccgaccttctgggctcaagtgatcccacctcagacacccaagtagtggcgaccacaggcatgagccaccacgcctagctagtttttgtatttttttgtagagatgcggttttgccagactgcccaggctggtctcaaactcttgagctcaagtgatgccccatcataggcctcccagagtcctgggagtacaggcgagagacaccaggcctggctaatagtttttttttttttttttgagatggagtctcactctgtcgccagtctggagtgcagtggcgtgagcaatctcagcccactgcaacctctgcctcctgggttaaagtgattctcctgcctcagcctcccaagtagctgggactacaggtgtgcgctaccacacccggctaatttttatatttttagtagagacggggtttcaccacgttggccaggatggtctcaatctcccgacctcgtgatccgcccgcctcagcctcccaaagtgctgggattacaggcgtgagccaccatgcccggccctggctaacgatttttatgggatagtttatcttccctatccccaaagcaaggagaagtctcaatttttatataaaacactggcaactaattcataaaaacaaaactagtccaatccaaacacggggccactaattttgtagcttttagataagaagatattagcccatactatttatgaatgtggatacattatactatttaaaaaaacccactttgtacaaaatggactcccaactgttcaccagttacttctgactgataaaatgatttcccaacagagtacaatggacccttagggactcaatgtttgtctccctccatccccctaattccagttcaaatcccacaccttaaaggtgatgaccttaagaggtagagcccttgggaagtgactgggtgaggaaatgactgggtcatgaatgggatcagtgcctttacacaagggagtctagtcagtgctctggccctctctctgccatatgaggatgtgggaagaagctgacggtctgctgcctggccgtcaccagaacctgaccatgctggcagcctcatctcagacttccagcctccagaactgcgagcaaggcatttctttacaagccacccagtctatgctactcaattatggcagccagaactcactaagctttctaggctggttggctatatactcccatggcctgagatgggaagtggtatgcttgctggctgttggctgggggcccgccttcctcggaacgcccaggctcgggctggttttatattgcaagcacgaagtgctgtgtgaggacacactgcattcgccaaccacagaacacagggtcctcgggcaaagtgggactcagtgtattcacacagacttatcatccatccaggtagaggaggaggcatctcactatggtagccaccccacccccagctcctggcctgccatcctgtcaccaagaccttcagaaggactctggtcattagggtcccttcctcagtgcacacatactgttctagggggcctaagagccccagcttacgtgaaggataaataacaatggagacatggaagaggtgggcccccagctccacccaacaggggaatctggtgctgtgataggctcaaaatacttttgagggccaaaaggacggggctggatgaaatgtgaagacagccatgtgacctgcaagcaccggcatagcttcttcaagagtgtcagagccttcattacacaaactgaatgcaccctggtcgtcactgtggctacagcaggggacatgtggctggagacattctcaatcatcatgagtgggagtgggaggtgctactggcatcccgtgggtagaggccagggatgccgctgaacgtcctacaatgcacaggacaggccaggcctcctacgagagaatgaagagaatgatctggccccaaatatacttattgccaagagctagaaaccctggtttagaatatgcaaaaatttttcttaagattcaaggctgcaacttcattcatttatgcatgagggggctactgattttcctgggaagccagcaataatgggggggggggtgtgggagaaaaccgattcgtgcatggaaaataccacaaaaggaaccccttctccctgtgagggctcctgtctttcccccactctgcgttcccaaacatggctccagtttctcagctgacccaaactacaggtatcatttttagtgtgtggacaaggtcatcatcctgagttgattgtactatcctgagttgactgtaccagaatgccttctgtggacataagattcaaattggaaaatgaacttgctcacaggcctttgcacttgaacatcttatctacgtatacctttctctttgagaagccctttttttttttttttttttggtggtggggtggggtcggggggtagcagcattgtctcactctgtggcctaggctggagtgcagtgggtgatctcggctcactgcaatctccacctcccagcttcaagcacctctcccacctcagcctccctagcagctgagactgcaggtgtgcgccaccacacgtgactgggaagccttctggttttaagatggctttagaatgaaaggcagttcctagcacctgtggtcaatcacatctgaccgaacacacccccttttaaaataggagcttctgtttgttccatgaaattaggcattggaagaaatgggggcggtgtacacagttcctgctgagaaggctgattgttctgaccctgacttagcatctgcgggaggttaagcttccgccaagtttgggcttctctccctggccccggggccgtggtgctcacaagctgagacaaagtcagttccttttctcacctgtatgtggcaccattgagctcaggatgaattgcttgctggtctattactgaccaaggcgctgatgtgacaaagaattccttgttcacacaatttcttaagctttctgggatgcgacctagggtaagatgattaaaattaatcatattatttttacaaatcacagtaagttcaacattacacctgtagctgcttatgtggggaaataagcatttgtaaaaatgtagaacatccaaaggcccaagtgcttgagctcttcaacactgaccttcagcctctgtgtgccccccgacccccgagtttataatgtctgggactaaagggaatggttccctctgtgaagtttagttcagggcttacgtaaataaacagggcccaactcatataaatttgatgctaaaagtgaattctacctgtcgagagctgcctgtagccagcaggacaggagccggctgcactgtggagctgaggctgcccttggcaggccagaggcacggaggggctcacctgtgatggctcggcggatctcggtggcagctgcctccctcatctccagtgacgcctgctcactgtaccaggcagtgtgaggagtgcagatgagattcggggcatctttcaacggaccctgagcaaagctagaaaaatgtagaaaaaacagagtaagcgggaaatgtcgcatacgctccctgccctcctcagcacaagggagctcttggccatgtagaaaagtagctacatagatagcatggatacaggaacatctgtgatgatattttatgaaggctgggaatttttgaatgtaattatcaaagttgtgtaagaaccgtataattggtagatcaaaaagcccaattctattgaaggcttgtcctgctgtaatccagggcagagatgatgcctgtctgtctgaagaccagaaccactgccacacccccaccaattttctgcctctcctttccctgatgacctctgggaaacttccagcccttttacaattagaatacagcacaatccttagaagaacagagactgtaaatgtcatctctggagtttcctgcccagggacctgtttgggaaaagggcctcgagttcaaagtgtgggggtcaggtgtggagctgggccctgtgggctcctggtaggcggctggggcaacacgcacctgaagggctctgactcatgcacgtcgagggctgcccctcgtatcctgccctccttgagggcttgtgctaaggctttctcgtccaccaggccgccacgggctgcgttcacaaggaatgctccctgcctcatctgtggaaggaaagaaaagccggttacaggcacactggcatggtggaagactcttgtaccaaggtttaaagaagaaagctgcaagctagttttgttggtctggtggtttaatgtgtgtgctgcagtttgagggaagggagtgggaagtgttggtgacggctggaagccagggccgttgctgctgatcctgagaggaagcaacacggtggaaaggctggactgtgccgagctgctggcctctttaaaggttctgggaagcttctgaagctgggtcctggctagcgcctgtccttctctgcttagcctggctcagcccgaggaaggggcttcacgtggcttgtcactggtttgttgcagggcctcttccctgctcaacagtgtatccagaaaccacctccgttgccctccgtgtccctcttgtgcccacaagcaagtgctaccacctttcgacagaagcttccatggcatctattttcaaattacctgctttatggtaaagtcattgatgaggtggtggttatgttcgttgagattgcagtgcaaggagacgcagtcgctctgatacagcaaatcctgcagggtgtagaccctctgcacgcccagggaccgctcgatcccatcctgcaagtaggggtcataaaatatgacgctgaatccaaaggccttggctcgaactgcaaccgcctgccccgtgcgacctgtacagaaacagagcgtccaggtgagtgagtccacagcccgcgccccagcgctgccacctccattgcttctgagctgagtccgggcttggcatccccgctggtagctgctgccagagaaaccgtgtgcccaaagcttagtgaggcctgaggcgagcactgcccgcgaggggccaccatggccggtgtaggacaggtgaggaccgcagtgcttgctgcttatattgggtacagcaggatttttgttaaaaacaaaacaaaacccttccttgttattgacattttcaaacacagagtgttctgacaagcccacatgcccctcccatcaccacccgtgtcctccgttcccacccctctccccacttcttgtgtgcactgcaggcttcttaacatgagctttgtgtttgaaaaacttgctctcaatgtcacagggagtaatgtcctgcctcctcattgctgggctcgctcctgcaaagggtgacatgagcacaatggctccctgcaggctggcccgagtgcagactggccacatgctactgtgttctgggcgggaggcagggcacatgaccatcagacctggacctgtcccactggtggggcctcgcgcccatctgcattatgcagcctgggcctcccgccagctatgtcacaggatgaggaggtgtctcccactccccaacggctgtcatttcataaacccatggggtccccctcgatagcacctccagcttcccagagcagttttcagcattttgaaaacaaaatggttagtgttgatgctcgactggttctcttggagatcacagaaggaatctttaaagccatggctccaaggtgcaggcaggagaaggacaaagatgcgcatttccgagcaggcagcctgtgttccaggggtacctcaatgctggatggctcctcctgcagcagctccatctaaccgatggcctggctaggacaactgccgtagtttagaacaaaggttgaataaggccagtctgatcagggacagctgcaggacaactagtatagcaaggcacgaaccatcacgcctctcctcctcagtgtcaccctttacagcaggcaggactggacggtggcagggacggagtgagagatggctctctgacgcactggcaacatgaaactgaggaccccagcatgcaactgctgggagctcacacttcacaggacccccgcctgccttcccccgttcctgcagcctccatccccctcatggcgtctgtgcacgaacatgcttcaatcagtggggctcacactctgcagatccagggcctggagggcctgtggaaaagcagcccagagcaccaagcccagatttgaaccgtgccgacggctatttctttgttttttttttttttttttttaaagttcacaaaccccttgaactttatccatgagattttctgatgacccaatgacttaatcctgctactgacttaatcaaaacccagtccctacagaagagacctgctcccccgtcacagcgccccccccggccccccatgccgcttattttaaaagcgcagctcccacaggctgcctttccttcagtttctgtccatgcccccagccccaggctgccctctcttggcggcaccgtcccaccccgcctgctgcactgagcccgctgggcctgggggactcttgctcagtagaacccgaggccagcaaaagctcttagcccaggatggctgcagcagcgacagtcctgaaggctacagagacacctggaaagggaacaaggagagcacgacagtccctgtgctgaggatccagggtggtggcggcaggggttagtgtacagtctcgagaaaacagggcggcggcagggggctgcactgacctctatacaccgagagggtttttaaagttgaatgacaagggcacagctacaggaacgaccccaggaagaagtcccgtgacggctggagtcagaagcccctgaaacaagcacctccccagtgaggccccaccgtgtacccagggtgctcatgaccacccccaggctctgcagcctggccagagaccaccgaggccccaggaggggcttcagagatggagatgaagctgcatctccgagccatgaggcccagtggggcccggacagagggagcctggtgttcacacaccacatctgttttccaacaaagtcaaaacacggtgggtcctttcagaagatccccagcacccgacacttcaactcagactccaggcgtcgggcgaggccagacccaggagatcacagcctgtagcggggacagaaaggtgtgcactcctggaagcgtccagcaacttctctcttgttcaagtggcaccccaggtccagagcggggcttgtggggagaggagcacgggggcttcgtcctcggaggcgcggagctccaagcaagggctgagcagcagctgggagtctcccggaggccagaacattactggccccgtgtgcacatgcgccttcttggagtcccaaaaggcagataccacgtatcccaccaaatatctacttacagattgggaaattgaggcaaaaagctcaggtaattcccacaaggccacagagctggtaagcggtggggttgagattcagtggcaatgggccgaggtctcctgggtgtggtgtggaccctgatggtgagcagggtggggacctcctcgagcccccatggaatcaggctgcttaccatcaccttctccgtggcaccggcccctaccaccctgctgaagaccctcctgggcctctcctcacgtctccttttcctgcccctctctcaggagagctttccaagctgatggcctgactgtgccaccccaacctggcatttgaaggccttcaggagtgaggccatgtccataacccgcgtctccactgaaccctacgccagcccctacacgagccccaagcctggctgctgctttacgacacacctccatacagcccctgcccttcacccctgcccagggaaatttactgggcacagcgccttgcccgctgccccacagcaaagaatgctgtcctgccagacactacagacagcagtggacacgcattcttccagaaccagcccagatcctgcctctagggtgagttgcctgatgggtcttgactccgatctcctaccccgtgcaacacggggagggtgctggccctgcctgccctggctcctcaagagcaggctggggttgcctttcccgaggggtccccactacaccagccccagtgtcggaggggttgggggtcagcgcagagggtggcacgtaccaaagccaatgaggcccagcgtctccccacggatgcgggccgctcccgaggccacctcgcggatctgctccacgctctgaacccgcgtgccttcccgcagtgcctggtacagccacgtgttcctccggtacaggttgaggatgtggcagatggtagagtccgctgtctcttccacggctgcagacgggatgttgcacacggcaattcctgaaagggatgaggccaaggccggagatgagaaaacctcaagatcagtggggaagccccagggctcccagcccgccctcctgagactcggttgttggcaccgggggaggcccaccttatcgtctagcagacgcggggctgggcacgtgggcggtaggccctctggctctgatgcatgggaagctctagccccaacatctacccctccctcccaaggaggacttttgctccaggacgtggctcatgaccaacccaactcctatggctgattttgggcctgactggcttcctcctgggcttgcactgagtcccaagaaaggacccggagtggcaggaagccagtgggcctcagaccagactcctccaagtggaccccactcagcctcaaacccctcagggtctccctcatggagctggcagggtgacaaagaatggcttttggttttaagctatgctaacagtttgatgcaaaaaacatacgttttaaacatactggttttaaaaaaacacctccacccccacacggatgcaagggctggccccgggaacggaaccgatggccgaagcgtgtgcacaatcgccctgtggtcatgtgctcagcaccctgctctgctgggaagaactcagagcagacaggatgccctccctgccccgtggagcagccttcaggtcagggccgagggtggcttggggtgagccctctggccccacacgagctgcagagaccagggtcaagtatctcccagcacaaagcagctgtggcatggagagttaacccaagtcataggcagaaagggccctgccatttaccctcctcagccagagggtgtctggggaagaatgaatgactgccagatacaacaggggtgcaagtaggcagagggccaggctgggaacggcccctccctacacccgacaggtggagatccagaggcctgcttgcagcagagaccagaggggccgagccaggggcggggccccagagggtgggctcagcagccagcctgtggctcccagttgagctctctgaggaggggtgtggctatctgggcatcacgtcagcccaagtgaaatggttccctcctaatcccagctttgggacccttaggagagtgtctctcccagcaaggggtgcccaaggcactgggacagggccacctttaaggcagcccaggattcctctatcttaagtcctgaagattggggtggggacagattggggtggggacggcaatcaccaaggcagcttcttcggctctactggacaggaaacaagaccagtgggtgccacaaacccactttctagatggctgcgtggctgtctccccacaagggccacccctaggtctagggccttgagagtgacccgcttagcaagacacacagctcagagaaggtgaagccactgtgagcaggtcacccacccacccaacgtggccactgagggctcctctgggccaccgacccctgccaagggaccagtgtggttgacggtgactgaggccgaccaactttcccacgagctggatgccaggaatcttgcaggaaactggcctcattcatttgaaatagctcagcagagaagctggggcttgatcacatgccatgttattattaagtcagacagactgaggctgatgccagaggttcaagaaaatctttggcggctgggacaattttcattcctcgggcaggctaaagcccagcagggaggccccgcagcagaatcaccctcaaggacgctggctccgtgctgctgccggggctggctcggcagtgctgcctggcgtcaacagcagcacctcctcctaggagatgagctgatgctggctgggagaccccacaaggccacgtgtgtaaaggcacccgggtgggtgggtggcacaaaaaggcaggttgaggcaggacatctggtcagtcttctcaccgaacttggacattcagctccgtggttccactgctcaccggagtgcagagtcccaggacggggagatggtgcaggaggaagagctgcagccactgcctgggatggcagaaccttcccacccagaccgcggcggcgccactgccaggaacctccataaccctcaccgctctctcggagggagcatcttcttagctgtcctctatcgctctgtggatgcagcctcccttctggatgagtcaagctgatccttcaagtgccacacgatgggtggctctgatactcgcaggctgggcctcccagcatccacggagcctggaaaacggccccaaagaggcaagctgcttttctctcacggtcagtgccatcgtgctttaatcccttcatgactgccgctggcaaggaaaccacataaaccagcttgctagaggcggcgggggtggggaggggtgtagggccctctcgaggtcttcccggctcgtggggagaagtgcaggtgagcagcttcctcaagccttgccctgctcttgccgtgaagcgctgactctcgcctgtcattccagggctgacagctcagagccttgcgatcccagaaggtgtcaccagaggcctagtgtgctgcctcgtgcaacatggagggccttgttttctgggcctgcgagggaccctctttcatcaggagagggcctgcctgcagccacctgccgctcccagccctcagcacaaaaggcccgttgaccgcatgatgtggggaatatgcattcggagacaaaggacgtctggacagaggctcattttccgcctccagagtctacattcgaaaagtgccctttaaaagggccccgcagatgtcttccaagcgcccttatcagatgggaccaggatcaatgaaaatccaccactcacagcccttctacattttccaaaaccgcagtccctggtcctggtcgtcttctgtgggtctcagaactcagggaacacaacctcccatctcggccctcccaggccccctgtcattgaggccttggtgcctttctggccccactgcctgtgcggggcacttctagaaatggagaaataggaagttccacaggcaaggacctcccctctctccctggaaagcagcgtctggtccagccgaggaagggcagggtcagcacccgtatgggcctgggagctgtgtggtgaggggccgacgtgctggagaagcaagaggtgcgggggacaaggatttgagagcccctggcacatgaagctgtattctcctctgctgttgaaacttgggatttcagctctacccagagcacaaaggacatttgttttcaaacaaaaatatccttgtttgtgccagggaaagatggaaaattttagtttatattaaacacgcctttgaagactcacatcttctggagtgtctttgttccaacagaggggctcggaaggacgccgtggctggtagcaagtgaggggtgtggggagggtgaggggtggatgtgtgaagctgctgcttccaggaccctaaggggtgtggaatctgagtgactctctctccttccctggccttttgctttgggatttgcccgtggggcagccccaccccactgcgtcctgacccctgtgagtgtacgggcagctccctgctcgcccggctccccagccctgctcctgacaccaagacccacccagtgcttccggtacctgggtgctgccccgactggccgtgaaggattcaactaagattctgacccatacactccatgccccaggctaaggctgtggagagacagctggagcccatgggggtggcctccctgaaaacgtggccggtggtgcccgagagcaggattctcagatgtatgtaacactccgctcacacacagagcccatctgacacccagcccgtcccggaagcaccggggcccactggggccttagccgatgggagagaggtggggaaatagcgcctgggctattcctggagcacaggaagagctgttccaaggccaggctgctgccttggaattcatggtgcctcatgaatttggggcacctcagcactcgtaaggcagagtacagcccccacccccaaaatgcaggggtggcgtgttccaaacacagagcaagcacagtgcccacctggccctctcccgaggacgctcgatgccagcggtctgcttcttgtgcctctgcactcagcactcacgagctcacacggggtgctgggcagaggcccccctcaacatgcacccccagccgcaagtgcatggggccgataagcagctttgaagcccccaactctgggttcccgcctgctgcctctgcttttcttcggaagcctctgtcatcaactgtgttgggcaggggcccacctgctttggtgctgacctggaccacatgctgctaaggctgccctcccagaacgggaggcccaggttcccatgtggacaggggcctagagctgtgcacacggcaggggcagtttaggggacacacacggcaggggtcatttaggggacgcacccagcaggggtggtttagaggacatgtggccagtcgcattctcccctctggaggcggcactgggtgtctccaaattgagcctgtgccagctgggtgttgctctgagggcagagatgcctcacagccccgcagaccccacacaagggccagcagggactatcctacctgtgtcatgtgaaggcagggccgcaaggtgctccacagcccggcctggaggcagccaccttgctacagccagaagcggctgctccgtggtcccagttccagctgcttctccaagcccacccgagcagggcccacagagctccggacaactccaggcagccagcgctgcctcgcactcaccgagctcgccggcagccttgatgtccacgttgtcatagccactgcctatccgcacgatcactctcagggccttgaacttctccaggtcctccctggtgagggtgatggtgtggtacatcatggcgcccacggcttcgtttagaacctgcgtgggaacagagcacagggtcggagccccaccccgtgcagcccaccggcaccacttggcctggccccctggccctatcacccttgaacctgaggcagaggagttcagcaggaaagcagggaacaggggttctggggcctgccggtgacttggggcgatctaatggggggatgctggggaggaaactgcccaaggtcagtgcaggccccggccgggcagggtgggcccaccttctcgtggatttcctgcgtcgactgcgcgtcacagaaggccacagtggccaggtccttcaggatgggcatctccacagtgcagtcgcggccgtccagcagcgccaccagggggcgggggtgcagggggccgttcatgatctgggggcggatacctgccaggagggaaggggtgagcacagtgggtgggtggctggggccacagggtgcgtggaggggcagctccccactcatcactcagggcagggcttgggcaagcgagggtggcggagcagcgagggcaccgcctccacctgcatcaccttccagggagccactgacacgaagaggagccacttcccatccacttgcggctctggctggagacgcacacggctgcttccctgccagcagaccatagtcccgagagcctcaggaccatggggccccgaggccagcacaggctagtccagcacaggacgggtccctgcaccgcgtgcctccctgcctgcaccggcaccagctgcccctcacacactatgacaggggataaggcgtgtgcgtccaaaggaacttcctggacaggccctgcacaaacaggcggcctgggcaggctcctccagcccctctcacctgcgctgggtgaggagaaatggcgggtctggggcagggaaggtatgcctgagggcaggaggcctctaggggctcaggagagcaaacttctcaaaggaccacacagcaagcagctctctagacaggccagagccatcatattaatcctgacagatttcctggtgctgccaacaaggtgaagggacagctgtgaggacagaggggcaggggtgaccccaggaagggccccagtggtccttcccacaagtccaagtacaaattctctagcaacttcatctggaccagcgcggctgcatctagacgttcagcagggtggtggaaggccttacctgccacactacagacgcgcatgcttgcgccccgtgcacatacagggcagacaccctgcggggcccgcccaggatgcagcgagagcctcagggcctcttttctctctttattctgtgcagcaaacccagcaggctccgaagacctcagagacagagaagcagcattttctccaacaaaaactgcccccttcaaatccatccttggatttcgtaggtcctcctgaccatctgcccaaacctcacatcttcaagacccacaccctggacacaagagaacaactacctgagttccagaggtgcaatccgccgagatgccaggaaggggcaatgtctcttgtcaaattagaactctttagcctcagattaaaactttggggctcatcaacttttcagatatccagatcaaccctgacggcggccttacatccccatcccctccctccctctgaggctggacggtccaggccattgctccaggctgagcccagcctggtgacccaccatgggtaacccaaccaggaaggtgtgacattcccgggatcactggcctttgagcacaaggcagcaggctcagggtcccacaggcaaaagcaggagccttccacaaaggccaacttcatctgtgtggcctcgccttccatccctaacctcctcaagggctcttagtagtccccaagctggccacttggtggggacgatgactgggaccccagccacgggggggctcctgctggaccaccaaggctcatattccgttagccacacgctcggagacgaggaaggaaatccccctccactggggccgtgactgcatcctgttaagactatacacggtgctggggagggacggcccagagcacctgcaccagccctgcatggaaggccgtgctcggccagtgggacttgggataattgtctctttgagcacaaagtacaaaaaaggcttttgtcccagcctcagaagaatgggctggggtagccaggtccacagccagccccgcatggcccccaagctaagtgcagttctcctgccacccccggctgggagaaatcatggcccctctcagccctgagcggcagctgcacctgacgctcagacaccaaaggcacacgtgcacccagtcactcctgctgctgccccgacacccaggtccccaaacagggtgtccgcatggatccgcactccaacatccttctgcaccaggaaaacagggcaggggagggggaaaataaggcagggacgagggccaacacccccgtgtcctcaccagcccacgacctgtatgagtggacaggaagcgtgcagcacaaagctggataccccctcagctcatccgcgagatccgcaacagcaccgtcacctgacgaggaacccgacacacatggctcccacctgggctcctgttttctgctaagaaaatggtacaactgccaaattccacaagattccttctgtttcagtacactcttctggcccctacttgaggtctgagcgcacaaccctgtggggcctggaagtcctggtctcatgccccaggcggtcgcccacacacagtgaggaacaccccaacttcactttcaggggtgctggcaggatggttatcggagagagtgcctgattataagaaatccaagctgttcgttaaatggtagccacacaggaaaaccacgctgggcgcaaggtgggaatccagagccgctgatgcgtctggggagcctgagaggccattgtcacaagatgtccatccgcagcatcatcagtgcatggatccgttaccagggtaacaaactccaggttgcctagcgatcggctccctccccgacacgggttgcctttctccttggtgaaacccaccctctaccctccctgatggccgggcacgcagaacgtggctgaggctggcccgagacctgtccaaggtctgaggctcgaatcctggcagcaggtccttcatggcaaggcgggaaaagagaaaagccaacgggttctcatgctgggaaaagatgccgggcacgacggctggaggtggggggttgggagtgggtgggatgcttgcgtgccctgcatgaggtgcagggatatggaggccacaggagacccccaagccctgggcatgagagcttagctgggacaatgccaaggtttgctctagaagggaaagcaccatcttccaagtgctccttcagtcccagaaggaaactgtccacccacacaccagagaatctggactgaaattcaagcccttgcctagcagccgctgccctacaggcttgctggagcctggggcagaggtttctggaagagctcatatggaagatctcatatggagagatgaaggtgcaaacagatcccccatcttacctcacacaggattcctgacgcctctttcaggcttctgaccatttgagcaagtttttaacctattaggatgtaactgacacacagagtaagattcatatacattaagatggaacacgaccctttcagggacgtggggtccccaggcccagtggggcaggattgggaatttgcgaggagaaagcccaaggcgcagtacgtaatgagggcttccgaagaactgggctttatgctaaaaagccatggcttccagttgctatgcacagctgacggccttttccatgcgtacagaccacaaggctgacaagagtcctgcagtgctgctgttcttcccacttcacagcccgggagtcagcgctcagggtggccccgtaccacggtgcgcaaccacgaggtatgaggagacacttgcggacgagggtcacagggccctggtgccctctatgcgctatttttcctttctaccgtctcccgccagtaaacctgccttgtccatttcaggacaattccagctgcaactggacacatcacggaaatgacatcagtgccttactgttgacagcttgcccacattaactgtgtagagcagaaagccctgccggctcccctggtatcaattactatctggtttcaggcttgcgtgtgcaccaggacggccctgcccctccgtccgggatgtgctgtgcaccagctcaaggcagtgctgacgcccatccctgggcctggtattgcttagagctgcagctgcaataaatacttgtgaaatgagagatgctcagtcaaaaacaaagacaacaccaggccaaactgctggacttttgtgaacagtaaccagacacccaggaaaagcaaagtgcgtggatctcacagatcctaaggcaggtagatctcagggaggatggcggaaggatccggagctggaaaacgctacatttcattgtggggagctgctgctttctcggatacaggcagacaggcctggagttgaccttctggctcagtaccatgcaaggcaaatgggatgttcccctgagcagtcaccaagaaggaactggattgatcctgccacacaaagctgcctgcagtgtttctgagacccattttccagtcttcctagacactgtgtgagctaagccgacatccttccaacagaaattctcattatttaaaaatgatctaaatgggtttctgttgcttacagcacaagacaacctgccccagggtaaagggtttcaggatttgaggcttctaccccaaagcaaagcagctgcaaatgatcatttctgacataggaggcaaaggctggctctggcttttttttttttggagacagagtttcacttttgttgcccaggctggaatgcagtggcacgatctccgctcactgcaacctccacctcccaggttcaagtgattctcctgccttagcctcccaaatagctgagactacaggcatgtgccaccatgcctggctaattttgtatttttagcagagacagggtttcgcgatgttggccaggctggcttcgaacccctgacctcaggtgatccacctgcctcggtctcccaaaatgctgggattacaggcaataagccaccgtgcctggccggctctggcctctttttttaaaacgcactagattttatggaagtttcctgacaccgtagcagtctcaagacaccagtgcctgagtcactccctgttcctgacaggggctacggctgcccaaggacagacactggccacataccccagggttgccccatgaagtccctgcaggttgcagtcttagagctgaccgagctatcacattcatgagaagaaccgctgctcagagtcacagtagtggccttgcaggagggagcctctgtggaatgagggcagttgctggaatttgccgggtgccgtcaccagctgccctaacacagatgttgtaagaagtacctggatccttccacagacgggagatccaggcaggtcttccaaagatcccgacagaaggtgtcagagtgctgcaagcagctccgagctgtacagagtaaagcagaggttcctcttcaaagactttcctccccgtctaattaggaataaatactaacttctcttagaggcaaaatttattcaaagatctgtgctaacattcttaaatatttgctagccgtaataaggaaatcaatgtacgttatgttcttagctcccgcaatttagcctaaatatttgccttagcatgcttatactggtccaagcaagcattaggtcatagcctgttcctcttccttatttgaaggtgtttttacctttctcaacattccacaagttacttcctccttcctttgttcccctctacctttgcctctttaaaaaagttctaagttgctagccaatcgggacaaatagagaatgtgaggtccctttccagccaacggaaactggacacagcggtagggtggacgtgtcaggttataaatgaccctgtgtcctttgttgggtgaactctcgtgggaaaactgctggagagtgtaccctttctgcagaaagtaaaaatggccttactaagtaaattaaatttatgttcaagtgctatttctttatggcaccggggaacgagcattccaaacagagccaagcgattcacggcttcatcagcccctgtgacctgcaggtggcctgggaggcaggaggagcctaagcagccggtgtggctcccagcctcatgcacaatgatccaggaagaaagaggagacaaaaccacacaaactccagaggccggggcgggacagggagtgacccaacacagccgaacctgaggccccgcctgcctccaaggaagccccacttaatatcccaccgatcccaccaccctcagaaaagcttcctcttaaatgcggcctgctccccaattaagtggccgctttctgcaatccagcatgacccgatccccactggctgagctcagcagacctgatttctagaaagccagacacagaatcagaactaaggcctgctaacagtgttatttcagaggcttgggtttctacaacataaaactgaaaatcgtgacagggccaagctgggggccagattctgatgctgggacgtacgcaagtgcctctcagacacttggcgttagacttgtaaacacagctgcctcagtgggtctacaggccagcccagcacacagggctgtggagctctgagtgggggaaggcggtctgtgggagcctcgtgttgtcaaggtaagagatgtctcccttgctttgtaaacatgtttaaccatgttataaaagctgttctaaaccgtcagacgtgggatctaaacaacaacaaatgttctgcagttggctgatctggaaagtgagcaagccacggtgactccccctccttgtgtccccagcagccgggaaggtgcctgttcccacggcagctgcagagaagactgcgggcaacaggcatctcccctctgcctttcacgagaaggaccacaggagcagggtgctgatgagcgggtggctccgggagcagcttcaaggcataatttggaagaaaatctgtgttgctaagagtggcactattttaaggttaaaaaaaaaaaaaaaaaaaaaaagcaactgctattggaaatctcagctttgtttctacgttgttatctgctttttcatttggcaaatgggctttctctctgtgttgcttctgggaagctctcccaatgctgcgtccacttctttgcccagcttcccagaggctgcgatttcattttacagtctcagtaatgtataggtagtatgtgctcccccagaatggagaacccaatccttgagttttaagtatcacctgacacgcccaacagattccctggctcatgtgcacactcctcctcccaccatgcaatgcaaatgcgcaacccttatctctctttctgcattcatggcagacatcactaatcgatccccacattcttcctgaagccaggacctcagccctggagtggcatcacacacaccaagctgttgaagacctggcccagctgaaaatgatttaactcaaccttggacaaggactggcctgaaccaggcactggaagacagcatgaggagagaatgagagagcagcgtggtacaaaatgagtgccggggaatttaaagcatgaagcacaccttctaaacttagaaagcggtgatggctgtgccatcaccgtgtacatccttagcagctatagggattatccttatttttcctccagtgaggtacaaccaggtaggaaaaagctcacaatctgcagcatattcagccagcccactcctcacactaaaaacgccaggatcttaatcttccaaagttgggctcttacttgtgaacaatttaaaagggtttatggcaaaggtttcatgtgaattatccctcaagttccccctgcttttctgtaaggagggaaaaaatcgagtgttgggaaatctagcttcaccaaggcctctgagcacccaggggctgtgctgtttggggtgccccacaccaagtgggctccccagaaggctggatgtgccccatggggaacctagttttaagctactcctcggcttctgagtttggcattctctgcaaagtcagctggaggtttggtgaagaaatggccacaggaacaccctgataaatagatttgcttcttaaataaaacatgtatctgaatgagtcacgatgtgacacatgagaggctcccaggtaatctcccttgtagctcaggtgacagctggacacagagctggcgaggcaggaggctccaggtacccctgtctttatccagccagtcaggtgcagtctgatgctccccagagcctgggccatgttctcaggcccccaaaagctttctgggtgatcatgttaataacgaagagcatgtgtggtatcttccagggttggaaagagatgtccagacccacaccatcaagttcagaaaaaacacaaaatacaaacccccctgaaaacgaagctcatctgcaaccctagaaagacaagcacgtgcagtcacttcaacgggttcctcagagcccctggggaagctgcagcccgcaccctgcagtgtccgcgctatgcggaacggaggagcacagcgggcccagaacacaggaaagtgacagctatttcccggtttgtaatggagtttaaaataaaaacaaaaccaagagtgatgttaggtgcttgaaagtgtttttaggcactggtggctttttggaagcccagacaccgtcctgttggctgcctctggtgttgagtgttcaggctccgtcaccttcacctaaccccgggtgcagctcatgttctggggtgaatttttgccctgagggagcaggtgccatccacccggggcagatccaacaaccccacccagcctgtgtgaatgcagacactgctgactcactgggcctgaaagatccgtgaagggacatcaccaaaaacggcgccttagaaggcattcccacagcgaagcagccaaggacgtgaggctctgcttctatttctggtgagacgcgctacgtgtgcgagatttccccagtggcccagcctcacatgggtggtccctgggctccgggagggaggacaggatgtgggggatagaagccggagcaacatccaagcctgaggagcaaggaataaggattgtggctcccactgggtgaggctctgcgacataccctcctgcttcccaacacggggacggtccctgcagggacgggtggtcaggatctcatgcacaggatagggacactctcagccaccactgtggctggggacacacatcgtctgagtcccctgtccaataaacagttctggtggaatcttccaggaggactgcttgttctcttcctgccggcacgccaaggtcagatgcgccctggggttctcactcccccacctgcctgtgcctctgcataccccactcgtgtggccgatcctccaagcctctgtggaagagatgagcctcagggcatcgccaaagactaaaaattgttgttgttgttgttttgagatggagtctcacgctgttgtccaggctggagtgcagtggcgcgatctcggctcactgcaacctccgcctcctgggctcacgtgattctcctgcctcagccttccagatggggtttcaccaagttggccaagcaggtctcaaacttctgaactcaggtgatccgcccgcctcggcctcccaaagtgctgggattacaggcatgagccaccgcgcccggccaaaagaagcacaaacctgccaaggacaaaaaggggctcccatatgactatctgttcaccctggtgaactcagtcgtcaaaaccaggactggctggtccacctaactcattcctccttgggaggtgcccacctcgcctctccaagctgccagccagcagcaaagaatgctatgactatggcgatgggccttctgtctcgagggtggcagctgccagcatgtggttccagcccacagctcctaaactatgagattctcagttcaaaggcccaagctccgagttgtgaggtggtctggagcctgttggaaagaccaccaagaatgcccaccatctgctcagcctcacctgtaatgaaaaccagctgcctgtagccaaggggccgcctgggatacccctactttacatatcccatgtgggcagggtgcattctgtgccacagtaattagacacagactagactttcccaggatgtgcctggaagctggggaaatacctgagactggaaacgcccgaagttgtaaaatagtctcgtgcgggcaccgctgccgtcagcctcttttacttaattggttttcaatactttattgcagcaataaaatcacctatgcaccaagaacccaaacacacagggagtcaagtttctggtaacaaagggatggtaaacagttagctccttataccatatgctgagcatcatgaccatggaatacagcctgtcccatttagaaggatggtcacggccacttctcttgcaccctccacacaaccctgtgccgtaggcgctgctgtttccccagcaggtaacggaggcggggggaacttgcccggggtcacacagcaagtaagtgatggagtcaggactcaaactcaggtctctctgacaccagagaccaagcatgcaaccccagggtccaccgcagtgcaaaccacctgctggattggttcaactcaacaagctctggacactggaaagacagacatcatcaggcctggccctaggaaacagacaggtgatcttgcctcggcaggctgaggtaggtcttaaagttctctctcttttactgcaggaatgtgattgttcgatctatcaaccaggcacacaaaatcaagaaccaagggcctgaggcttctcacgtgaggcatgcgctcttcccacccgggtgtctctctagatcttgcagcctaaaagagacgtcatcatggtaactgttatcagaacggcggagaacagaagggcacatccaagcaagaccgagacgccacaggatagtaacacgtgtgtgctggccccactccccaagctggatgcagggacacacggtcctcctcacggtgtcctattggcccagcaggcattcatggccccggtgataagaaaccttgtcctaacctggacgacacagtgaaatcccatctctacaaaatttactgggcgtggtgccacgtgcctgtagtcccagctacttaggaggctgaggcaggtggatcccttgagcccaggagttcaaggctgcagtgagctatgagtgtgccactgcacttcagcctgggtgacagagtgagacttggctctaaaaaattaactgaaaaaacaaacacctgatccaagaaatggatctatgtcaacttggcccttaacactggcctctaagagggttaatgcaagattcaatgcacacgaggttgaccttccttacggggagcaacctcttggcggcctcctggcaaatggcccaaatgccctgtgcctcagatgcctgagcccgtaggcctctggccaggcagaacttgccgagacgggaacaccagccctccagaaagcactgacttggaaggaagcacttcccctaaagtctcgggaagaatgagtttggggagctgagtttcacccagttctgagccgtggtggacaagaccagtgaccacggctgctcagaatccaggctctccaggttgagccaccagcagccgccttggccggcagggacgcccttctgtccttttcagcaataaccagagagaagggccaatcatcagatctcacctccaagcgaataaaaaccaagaaaagtgagcgttcgtcaacccaagctccccgtaccaggcagttttcctagaagatactctgcggtgtggaggatgtttaccagctaccacacatctgcttccttgggtagaggaaaaaaatgtgctccacgttcctcgacattaggtctgagtgaccggagcccgagggagcttcatagcgcagtaatggggaaacctgcgtggtcagtcccgctgtgattgtttggagactcacttctcaggcagcggattcacgctgctggacaaccagccagtgaggtgggaaaacccgcttgccagcaagtgaccaacacaaaagaaaaaactagtcatccccacccaagcaaggccattagcttctcttcgagtcctgcactgtccccagaagagccatggcccagatggaaaagaagcactgctggttttcatatcaatgcaaaaaatcagtgacaaccccacaggccacaagcaggaaacgtgacgtctgtttttgaaacagagcctttgctgtgcggtccctggtgtggcctggccatcctcccctgcctcgctggggccacagccgggctcccagggctccctccgtccactcccggtcttgcagttgggagggcgtcccggaagcccatgcagcccaaaccctagaggactccctctggctcgaggctgaggagggatgggctggcctcagtgctccccgaagcacttccaagaaggcgcctcgcccgcccgctgtgtggataccgctggtggaggtgttgggtgaacagctctcaagttctaaaaatgtgcccctgacaacaacagaaggggatgtttgagaaaaataagggaaaatagagaagagaaaagtacgaattgttgccagaggaatctggcagagcggccagctgctgcacactcactcgccggccgcacaagaggctgggtgctgggctggcagcgtgtccagtgtggacacacacggggctgggtgagattctgcaggaatctaaaaaggccacaggcaacccagagatggatggctcagtctgacttctcactgtgtgaaagtttgagaacgcctactgtgcgctgggtacccggatccctgcacctcacaaaaaggctctggcaccacccggggtgacggggaaggggatggtcagggtgcagtgagactggggtctgggaccctttggtgggtcccgatcaggctgaggaaggccatgaggccccgcccacccttcccagtgccccaagggacttttcctccaaggtacaggaagtagcagcaaccaggagggcaaacgccctggatgttccatgaacctgcagcgagccgagtgccactgccaagttccaggggccaccactgagtcactgcccgaggggatggctgcccatgagtgccgggaccaggagccctctggatggccgccctggctgctggcttgtcccttggaatcagatggaccaattccaccagtgttccagagaaatgaacaacacgtcctcccgcaaaaggaccctgagtagcctgtagcctggcagacccagtcttaattttctcaccttatttcccagggtgaatgtccacaaaagcaaaataacaccctcctccttagctatggcagccaaggctgagatgggagagggagaagcctcatgcttgcagcacactctcgtttttcgagtggtcctaaaacccaagaggaaagtgatccgcgaggactgctgtccggcaggccaagggccaagagcgctgcgcccaggcccagctcacagccaggaagtgaacattctcagcacaacagctggctggatgccgcctccactcttctttcttctctaactttttcttaaaatctagtaacttctacagcatcccaggctcagagcccagtttacaggaaaacactagaacccatcacaaaggcatatttattccttcatataaaaagcatctaataggcaaatccccagtggggaaacgtgttgggttgagaggccagaggtcagctctaagcactgtggatggaaggggaatggactggcctgcgctgggcagttggtgccaacattcagttccgcaggcagagcttccttccaccacgaaaaatcccttaatgcaatcccttaatgaggcagggccagaagaggaggtaggaaccccgggggaagtcagcgccaaagaacagctgactgtatccagccaaagtgcaagaagagcttaacaacttcaaccaggatgaggccctggtgaaatcagaaggtgacacgcaggaggctgtcgacgggtagcggaggaaggtgcaggctgaggagcagggaggtaatgccagaaagcaaactgcaaaccagcgctgatgccgcttctttggagaggcgataaaggcaggagaaactcacctctgcttctgagcaacgggttcatcggtcccatcttacatgcagtgtgattcttctatgtgatcagtttccctctttctttggttgctaggaagctcagagcagaattcccacctatccttgtgtacaggattgcacgggatgctgtgttccggccctaccaccctccctcaccttttcctacatttacttttccatttattaaaactttacccttgtgtgtgttacagctgttcccaacagccagcttaaatcctcttatgaccaaagaacattttacattccatttaatcacacaaaagaatggcatttgctcttcactgggagaattaattccctgaactctcccaggcagcagcatgatccagggcaaggagtttggccccgcagtcggagcagctcagatgcagcatggtcttgagggcagcagctggagccaggcaaacaccagcaggtgctcgtggagccagctggggaccctgagcttgccatgcacacagctccggtgtgatgcggttctcagagccgtggggggcaggtagggtgggcaccatcaccccagtgttacccatgggaagcgagcctcagagcccatcatgatgactgctgctccagagcccgtcatgactcttgctccagagcccagccactttgtcctgtttcctcttgctgacacagaccttggcttccagctcggactggtgtctcctccccaagtgtataccattgttgattttcccttgctgtgctaatgcaccgtgcctgaggatcatcatggcatgggccaccccctgctgtgggactcagggtagggggtgaacctctctgagtctgtcagaggaaaaatgtccagagtcttcctgggatttcagatgggggatcatccttgtcaaatgctccacaataggccaggtgcagtggctcacgcctgtaatcccaacactttgggaggctgaggcggggggatcacctgaggtcaggagtttgagaccagcctggccaacatggagaaatcccatctctactaatacaaaaattaaccaggtatggtagtgggcacctgtggtctcagcttcttgggaagcagaggttgcagtgagccgagattgttccactgcactccagcctgggtgacagagcaagactctgtctcaaaaaaacaaaaacaaaccaaaaaccaaaaaccaaaaaaagcaccagaccaaaccaaaccaaccaacaaacaaacaaacaaacaaacaaacaaacaaactccacaatagtgacaattactaatatttactgaactcagtcagggccctagattctctcaaggctggtttcccctacctcggccctggcaaaggggcaagaggcacattccatgggccacctggggtaggtgcaccccaccagccctgcggaggcaccgtgttcatatctagctggtattgcaggacgcgctccccgccaacgccactggcatcccacacaactgcattgggggaccaggaatcagggttcctactcttgccccttctggtgaagcacacccagggtgctaactcagccacaggctgccccatgtcccattgacatttgcaaaccctcctgggatgaatttctccatggctctcaggagaacatgtcccagggggccgcccactctgtcagtggggacgggtgtttctaggttggattttttgctctcctaacaatttggcaaaagttgttttattcacatgctgaaagctgctgttgggctaaatttaactacagtgtaccttcctgttccttcagcagttcctccctcccactggagggggcaagaaaagtgaacgaaggctagtttttttatcctttatgtaaaaaacaactagaaagccctttgttgaagccagcctcagagtgggaaacacacacctgacaactgcacgtttaatcacactcgtttctacatcgctaacgtgggctaattagttatggattacaagtactatttctctttcataaacttaccaaaaaaacctctcccacgtatgagcaaggaatctgtgaaaaagctttagaattctggcttcgtatgttcttgggggtaaataaatttgtgccaaacacctgaaaagctttcctgttaatatatgttggctttctcacttaaaaaaaaaaaccacgtctttcttccttagaatgttagtttccaaatgcaagaagtctggcgtgaagctctaattttgctctacccagcccagctctccacagctcagcttctgcaaagcacaaagcaaacactgggacaactggctgaatgggacccctacctcacaccatatgcagaactttactcaaagcagatcaagacctcaatgtcagagctaaaactaacattcctggaggacaacataagaatatatcttcatgaccctcgattaagcaatggtttcttagatgtcacaccaacggcataagcaaatacgtaagactccaaattaaaactttcatgcttcaaggacactatcaagaaattgaaaaaacaaccacagaatgggggagaactatttccaaactgtgtgcctgacaccaaaaagcctgggccccatgacccaggaagaccctcaactcaagcactgaggttgacagagctgaaatgtgacttgtggagccccaggatggacactggacactcaagagcaaaggccacatttgaaagtagagttaaagcaaaatagcgtaggggcccattggttgtttttatggccaggtgaacatggggccactcacctggtctgtggaatctgctcaggtacttatgcccttggctccgcaaaccttccaggaaaataggaaccataccttggccaagatcaacagcttttaaagatttcagaggagcaacaatccctggaggggtttaggaggccctgagcttggccatgcacagagttccaggtgtgatgtggttctcacagcactgggtgggggttggggggatgggatggggacagcacagccacacaaaactattatctagaaactgaagctatggccccatgacctgcttcctggaaagcagagggtccgctggccaagacctccctactccatgtggaactgctttctaaaccaggaagacagaacgcccctgtagacatgaggaggtcagtcaacgcgggccttgtggagacagacagaagagggtctggtgactggaacgcgggcagagctggccaaggtcccagcagcagtcttggctgacatggcctcccatgaaaacacgggtcaatccctttaaaccaacagcaagcgccgacctcattcaccacctgctctgagtcctgcaccacgcccggcagaaatcatttgtcgacctcttcccccttggagctctccagatgcggcgaggagcccagcctgttacgcacaaggcctgagactcacgaccccagccagctgacaccaagcatccacgttactctctggccagactcctggtcagatcacccacccaccagtgtggagggggtctgcgctgtcgagggggacacactctatgcaaggtgggcttacagaaattcccagatactcacttttgaaaaaaggcccactaagctttaacaagacagaggcctaggagagcagtctttgcacaaaactgaggaccacagcagggccttcttcagcagcttggccgctgtctagttgtcccggcatggctcaccccacgtcctccatggacagaatgaaatccacacccacggggtcagaggaagtgctgtgaaggcggcagagctgggggacaagtttggcccctgagaccccgagggcctcagtagtccagtgtgagaagaggccaagggtcaaccacgacaagaaaagcgccattccccgctgaggccaggcagctccaacctcaacacacaagccctctcttccttctctgctcactgctctcccagaagcagaggaaacaggttcaagacctaccccctttgacagacatggaaatagaagcacagagaactcaacatacttgcccaaacacaaagcaggtggcactccttcgggccatgcattcaactactttatgctcctgggctgaaatcatattcctggggtctacggcacgtccaggagcctgaaaggggaccaagaaacccagtctagcctagcagaatgagctccatgaacaaagggtgaggccaggttcaggcactcgctgagttcagtctggtaagggggcacaaccaagatgcgaatacttcagggcagcaacgggcaggagggatgatcactgctgttctgccatgaaggcggagggtgatctggcgaggtcacaagaagggctgggagtctcaggaggtcaggcatcagtcacaaccagggcctcagaggcacagaggccagtagcaggtgacttgcccaggggcacactgaatgcagggaacaccgggccatgaaacccaatgactgatcaagtacaaaagccaaacggaaggcccgcagagctcactgatgtcgggtgtgttcaatgttttgctagaaaaggctgagctgtcagcacctgggaaccgttcagctgctcttggatttggaagggaggccatgccgaggttcttgctctaccaggctggggtaggggcagagtcctggctatgtggctccacaatgctggaatgtttttactacgcaggcatagattactctgcaagaaaagagacgccacagggagtctcaaaacaccagtcaggcccttagctgcccttgcacacgacagctcacgcacacacttccatctgccccacgccggcctgggcggtggcctctcccctggccccagtctggctgcggtgctgagctctgcccttctcctgcttccctgccggtgcacacacatgcgctgtagggacgctcttccaagcataggagtggccaagaagccctggagctccaggtgctccacaggccccatcttggtgcctgctatacatagtcacagttaactgtccttttatgaattgcctttcctggcccccagaccagagagcacctaaacacaagccttgggtcttgcccacctgggagccccaaacatctggccacaggcctggcacatagcaggggacaggtcaatgaggaaggatggaaagaaggaagaacagcaggggtacaggtcaatgaggaaggaaggaaggaacagcaggggacaggtcaatgaggaaggaaggaagaagtgaacaagcctctaagctcacgctgggctctgcccagggcagtggtctgtgtccaggactcaggggtcctgggggcagcccggaagaggtttccttgctcccttacaactctctctggctggactgcatggccagcacacaggaagggctggactcatccctctgctggtctgcagggccagcctggggtcacagcccctggacctcacccccaaatgtccttgtgctctgagatgggggaagcctgccgaaggtttaagggtcaagaccctcaagagcagtgcgtcctctgccccaggacagacctcaaggtgcagaggagtctcaaacaagaggcaaggctgcttgaggactcagcagcaggggtgtgggccgatggcggcgaccctctatacagattctgatagggctaaaattattgatggaggtgctttctacctaggagatcagcgttcacacctccagttgctggaaaccgaggccacacgaaaagaagccatgagagtgaccagctctggtgacaggtaactgtcacaaccatcagcctcctcaacagcccctccacacagaccacgcgctcctccctccatcctggagtcctcaggcagtgaccctaagcaactagacaggggtcacatgtgcccccattaatccagttgcatcaagaaaaacggctggaagaaaatggaaaaagctcagaaagatctttttgtggctctttgggctgggactgcgtttctcacatctgaaactttgcccccagggtgtgtcctgagctgagccctgtgcaggctgcaggcttggctgtattttgtgaagacaaagatatgaaaatggccgcagccccattcgttcgttgtttctgatgatccctgctgcatctggtgcaggcagggctcgggtgacagcacgtgacacggggagattgctggctcgcagccaccgccggagggctccgcgacttgtgccatagccggccaggtcagcctgagagcgacagccgaccccaccacctgccaggtgctgccactcacgcgggcctggagcccccatttgtctgtgtcaccggggctggtgggccgcactggggtccccgcagcatacgccttcctcacgttgtcactctggactgcttggccagcaaactggactagaaataggagcctattgtgtgtatgcacaaaacccaccaagataaggcaggtagttcgtggactgagaaaaagcaaacatacattaaaaatagccaaagcatccgaaaataaaatagatactgaaaacaatccccaaaccccaaaccaccccactataagcagtgcaacaccgcccatcccgaaggggagaagagagtcaacttccagaagggcgttccttgtccctccgatgggagggaagcacttgagttaggcggcaccagaacgaagatgcgttcaggctggcggcgtcccaaacaagcaacactggatttccagatggccgcgtcctggaccagaggccggcgggactgcccagcctgtgctttcctgaaatgtcaacattatcctccacacacacaccgtctactttccctgctggctccgacagatccaaatgtgactgcggattctgtggaacctactgtacaaaacgtacagccatgtacacagctgaagcgctaccagggacgccagcccctgcccccttcccgacagggtgtgggggataatgccacaatcagcatacgataaggaatgaggagggaaactgcagctatggggtggatcatttaacagagacatttgatttgctggctggcttctgcctgcagacttccctggcactggctcgctgccacgcaaattaagtaaaaatcaatatcctccggtctgtaaaacatcgtgttagcaatcacactgcaaacaacttatataatacccctcactccatacccaaataatggcgaatgtttttgttaaaaggcaagtctaaaataaacaggaaaaagaaaagaaaagaaaaggcaatcttacaggttcctccttcggcaaaacctttccacgacttgggtgaggagataatctttctgtgattatgaccaaaccctcctgtcacttagcaacacataattaaggaatatgttttcagatccgctttgcaagcccggccattatcagatgaaattactggagcaacaaatgtcatcgccatgcaaatcagttggttgcaaagaaagaatgtttgactgagagagcaggcacaggccctcggaaaaattatctgacgtccctcctgccgcacatgtatttgagaaagtcaaataatgatgtgatcagacttcaaaaaaatccatgagacaaaatcagaatctatacgacaaagcagaaaatcaggccagttgctcagtctccacttggaaacaaaatgcaaaatgcctggaggtcatctctaggaggtaatattaatagcacacacgggccacacagcgatggcagagaaacttaaggtggtctctgcagggttgtgaggtccagcgcctcggtccccgcctacagctgcttcagggctattttcaaaaaggtagatcttattgtttcatcctgattttcacaagctattcaggaaaaaaaaaaatcatttgaaaaggattctgttttctgaatgacgtaggggaggctggcggggaggaaagaattatgtttgaaaggaagaaaactgatttacattttaaatttgtggtcaagactctagagttaaaataaaaattgtaaatggtgctctgaggacgcccacctaggacttcatccacaatgtccaaggaaacacacgccataaatcacacctggcacatgttgtgaagaaaaccacctaccatcactctccctttcctggacttggaaatatatccttcccttcaagcacgcggaattcccaactgtattttctgatatgagagactaaatctgtttttgaaactgagttctgagggatttcaacatcttgctttgtttaacccacaagtatgcaaacacacacattttcatctccacggtgggtaatcactgcctctgatacggcgtgcggacccgtgagaggtacgtttccacacgatcacgcccttctaaatggaggatgcacactttacagccagcatttgatgaaacgttcctgccttctccaaagttccctagtgtgaactacagaaagggccacccctcgtgagctcaaggctgcagtctgttctgagtgacttgcgactttctccaagaaacacagttgagttttaccaccgtaatgggaaatctacacatcaacccgacctcaactaaagaacaggagggcactgctgccccagcagatctggcctgacacacaaatctgattaacttaagagaagccgtgtcaactggccacagtgctgcgtccttcttgtttggtggtgtgtgtgtgtgtggcctggtgagtgaggacttgccatcctatgttcaaacttctacaaccccgcacccccctgctccccccaggtccccaggcagggcaggcggggaggatgtattacttggttctggtgcaagcatggtggacacgatgatgggtgcccctgtgcgccgggccaccttctggtacggtgagtgaggcgtgtggaggctctggctggccggcggcagggtggatggccccaggggtgcacctggcttccgcaagacctgggggctgccgtgagggctgggcagcggagaggcggccacgttgcgctccctctttagcagctccatgggcaccgtgtatgccgtggagtaggctgttctggggcctgggtgaagggggtttgaggggcccgggttagtcaaggccacccctgcctgcagggggtacgtggggctcagacgcgctgtcagggcgcaaggggtgggagagctgtacccggagttggaggggaagtgtggggcatgggtgcccacgccaggggcagaataggtggctgccgtctccaggaggtgctgagatggtgcgctggagggacggcgagccgggtctccagctcggggggatgctgtctgcagaggagccgcagcgcccagagaagccaagtcaccatggagcagttcgcttcggtggctgaagctgctggaccgcgcccggggcagcgggcccccccggtcctgcctccgcagctgcatttcggtcctgcagctattggccaggcggctcagaacacgggcctggcccaggttgggtgcgacagacttgatatccgcgtcctccagggtagccaggacggccggggagtcaaagccctgctgcagtagggctcccagcgtggcctctgccagcccctccgcccgcagaaaggccaggaactcagggagcacggtcctcttgccaccaggaccctggaaggtggacaggtcagcttcgtaagtctcgtaagccatcttggatgggatgctttcccgggcaggcccgtagccacgattcagggcccctggggccacccctgtgctgccttcgggggcagcagctgaactggggtccacaaccaggcacgtcggggccacctgtctggcaggggcagggtcaatgggtctttcgctgatgtcgctgaagacctggctgagggggtaggcaggcacctccgccccatacctggtgtcgggctgctcccgtccataccgcccgggagatgcagccctgctctgtgtctgccgcccctgagggatcattttacctccaggatcccggtacaggtgaccggcgtcctgcagggcaggtgaccggccttgcattggatcccatgacgttctgctgccaagcactccgtagctggggaccggccggctgactcctgggtcccgatagaggggaggctctttgggtaccctagcagctccagacggatcactgtagtactcccgtggcagcagggggctgcgaccagacatcactgcctgtctgctgtcgtagaaggtgaagtcaggagtagacccctttcttgcagccactgagttataaacggcctcccggtacaggtagggctcggcggccacgggcagggcagcgtcctgtggtcggtggtttggctcaaaccaagtcccctctgctgtgccatacgtcagggagcttctcctccccagaggccgcagggactcggcgttctcccaggggccctcgtaccacccagcagcatcccagctctgagaacgaccaatatttatatgcctgctgggaactggcattggaaaaaaaatgactgcggatgaggcagaggagaagcttttctttataaatcttcaattacatacatcaaaaacagacctggctgtgtgctaacccttccgagacggcagggacaaccaactgggggttttctgtttcaaagcatggcctgaattattaatcctccgaaaccttagcagacaaaacataagactcacggtaactttgcctcactccccaacgatagccagagaggtctgttccttacagctcagtcccggagaggaggctgtccccagcctgccaggtcccccttcctggctggtgtgctcacatggaccagggctctctcagcatgcggattaggagctaaataaaaccctaaagctttgttccatgtgacatctcgttagactgatgaagccggtggcttgctctatccagccctcccaagctgcaactgggatttacttccacactgacgctcaggtttatactccctcttccaagcaccagggtacttttaggatgaaccctgcctccccctctggaaggggctgttcccacccctgccactgattcctgagaggtaacagaagcaaaataaggctgcttcaatgtcagtccactcttaatccaccgtgatgaaacgttaatccatggcacagctaaacacaaattaaacatggataaacagaaaaaggtccacacgtgatcctaggccatggatgcctagcccaaaaaagggccagctctgaaacctgatgctttgataatactgagatctggctttgagacgactctttggttgtgaatcaaacaggtttccgagctcaagcccaaatgcattctttaccttattactgtgaaacacagatgggctcatgctgccggggggccggggagtgccagggaagggcgtgtgtaatctgggatttaaagtgactgcaacagaggtcacaggaacaggaggatgggtgactaaaccttacactgcaaagcagaactgggaagcggctgcatctgaatatctcatcttcctttaggtatgtcaggatgaaaagcctaattccagcaggcttagatcctgcagatgcttttccatattcacatggattaagctttcagagtccacaaaggacttcaggcgcaataatgcaaagaacagcagttatttagataaaggagtgccccgaagtattaagacatttccttaaacatatggaacagtaccagagaagcaacatcccagactaacacggtaggttcctgccctgcaactgcaggattcccatgacaaagaattcatagcaaaaataaaagccggtgattaggaagctacaaaggctgtatacattgaaagcactttaaaatgagacaacatgcatacctgcaagcattaaacccgagtgctgttcctcactcacatctctctcaatctagcactctactagaatcttctaaagagaaataccagtctttaaattttttttttttgagacacagtttttttttttttttgagaccgagttttgctcgtttctcaggctggagtgcaatggcgcgatctcggctcactgcagtctccgcctcctgggttcaagcaattctcctgcctcagcctcacaagtagctgggattacaggtgtgcaccaccacacccagctaatttttatatttttagtagagcctaccatgtctctactctatctacttcaccatgttggccagactggtctcaaactcctgacctcaggtgatccacccacctcagcctcccaaggtgctgggattacaggcatgagccactgcgcctggccagcgcctcaggattaagccaccttgccaatttctttcctccccttgttgtaatgaacaacatgaccttatgtggtgttagtactatgctaccccactcatggtgcatgcacacccctcaaagatgggtggataaacttggagcattccgggaaaatcccccatgccaagtcttttttgtagcagggtgaggtagctctgttgactcaccagcttctttgctatctggttttcagctcagcaagttctcaaatgtaaacagggctctatagaagaatgtttacccggtagcgcctaagaaaccagtaatgattcttcagagaggttactgagctggtgtccaaggggtgatcgcaggagcagggcagatgtgggcagatgcgctttggggcagcatcagcctcccattgaaccaggaggcccagcttccatttctatcaactttcaacctgttctgcttggaaaccacccaaactcgcacagccttggctctgagatttgacaaatattatgacagatgttttcctgcgctaggtaaaaacacctgtaactggactcacttttccaaacactctggttacacaaacaccacacacacacacacacacacaccacactccagtcttttagaaaggactgcttttcttaaaaattctcatgttgactaaaagtgagatgggacccattagagtaatacatctcacgggcttaattttttaattctgccaaaaccctcactatagaaattatgtcaagtaaaaataagatgattgtgtaacatagctgtgtcggggagagaggcgatgtccacccaaagccaattctgaagtccctgtgcgacacaaggtgtcaattaacaacagagacctacagagatccagacaattccagagatggatccagacagttccagaagagctgggaagagaggccaggatggggatgatcagtgggtaccctccgacggagcagtctttggacaaactgccaacaagcatttcatgttcccattggaataatcatgcaggaaactgcttgaaatgagagagaaaacatgactctggggtctaattctcacttttatagaaaaagaagaacaggtgggatcagtgagtctgaaggttgcagtaacatgagggccatttggctcaatggtgtgtccctcttaactgtgttgtcacccgcccacttggtgggctgccaggtttgtctcaaggccttctcagggaatagctcattctcaggaggcaacttaagttcccaactgaaggaacttaaggaacagcttccccaggggggtcctgcacctgcctgggcttccattccctgatcctgcctccaccaacacaaagggccagggcagctctgaaggtgatagcggaaataacatctcaggaggctcttcagcgcctgctgcatcccaggacggagccaccacagtgccctctacgtctcccacagcgagcgcttccctagggaggctgcagaagttagcgggtaacacggttttctggcagacacagggcagaaaaatcggcctatggcatacccatttcctgcttttaaatgtggacagcctgtgctggatttttgtctgcttctgtcaagttaagtgttgtggaatttgtgccattaaaaaagttttcttgggccgggtgccgtggctcatgcctgtaatcccagcactttgggagactgagtggggcggatcacctgatgtcaggagatggagaccatcctggccaacatggcgaaaccctgtctctactaaaaatacaaaaattagccgggcgtggtggcgggtgcctgtaatcccagctactcgggaggctgaggcaggagaatggcgtgaacccgggaggtgcaggttgcagtgagccgagacagaaccattgcattccagcctgggcaacagagcaagactccatttcaaaaaaaaaaaaaaaaaaaaaaaaagtctttcctctcatcaaccccctaccccctgcccccgaacgtcctcaacccaaagtagccaagttggctaatctaacgcaaagggtgggaggccacaccaaatgcactggttacatagcaaacacaaagtctggctgggttttaaagcagccttcgtctaaatcacgcaagcacacagcaacaattagcaaaactgcccagacatcgtttcaggtatcaaaggggctgagtgcaccgtgcacccttgcttgcacactgagtgctctcaccaatttctgggcctggagcgcggaggcttgggcacccacgcaacgcgccaaaggaagtcaggagagtgacgtcgagtgtctgaaccaacccagcctttttcagattagctgcatcctaagaagccccagtcctcatgtctctcagtatttagccatggtaagtgaaaacaaaggcctgcacattgcttctgactcaatttcttaactatattgtaaagcttcctgggaactgcattatgaaaattagaccactcattatggggtttcaaaagaaaaaaaaaaacaagcccattctcttgcactgcccattttgaaagtgttggtggagccaaagtgtgcaacgggaccccagctgggatgcaggacaggcctcaccttggaccatgtcaggattcccatttctagcaatggaacacactcaacctcaagaggctgtgctcagctctggacagcacccggcacaagacgctccgcacagtaggtgctcaatgaacaccaccccttctgctctttagcagcttttcctgcagattcccaaagtctccacctcacctccatggtgacccgccccatcacactccactgtttgaggtctcctcggctgtcctgcgatcagaaggtcccaggatgccgtccttcctctggttttgtgagcaatgctcctaatcagggctggctcagcgagccctcccccatgaacctttctcagtccaattctgtcactttgtccttagtccaaaaaacctgccactcctcaagatgagaaaggcaccccaaaaatagtccagggcatgcatgtgcctgtagagacaggccaaggcatggccgcttagcccctgacctgcggagcggagcgcacccctccctccacagcacgtgctccctccattcatcacgtgcttttcattttgtttgacacccgggctgtaaatcaaactgtcgactatgactcaatggtgatggacggctggcctcaagggagtgtacggtgtgatggggaaaaacgacagagacatggacacagtccccagaagcccctccccacaaccacttcagccctctgagcctgagcccacatcaaagcccaaacagccccatttgcaagcctgggcatggtaggcactaagctaggcaaagcacccaccgcccaaatacaaatggctgcctgacagagacctgctccacctgagcctgcacacggacagtttcagcacacgggccttgatgggacggtcagcctttcttaggatacgaaagaactgactctcagcctcactcccaagtctcggataaatctgcgtcacccatcccaggttgcaaatgggaagggaggaaccctcctggcacagacatctcttcaaccggaacacggaaaacaaaaccctcaggtgatgagaaacaggctggagggacagggagtgtgggatcccactgtgccccagcgctggacacccagaatgctctcccctctcggcatcttcacagcccagctggggtgctcagccaggctcctgctggatgtggaagggctgagaaaggcacgtgaggtcactctgtagatggagatgagacagagacagaggaacgccctcgagcgcgcacgccaaggtgcctgagctttagtagcaagcgagccaagtggtagaaaccaatcagagaggagtctcatttcacagctttaacactgtacgttctggaaaaggagagagggcaagaagccggcagcaaaatgtatcttggggttctggttcacagtcaccccaaatacctgtcaattaggttgagctgtgtgaagcgcgcagaaggttctccgcattcgtgcgggctgctgtctgctgctgtctggctaccctggggcctcctccaaacacggagactacggatgcactgttccccccgcggcactccttccccctgcccaccccaagcactgctcccctcaaggcactgacttggcctgaaactagagatgctcttttcccaaaggtgccgggaccaagaggacaggcactgagagtaaagccctgggcagctgggcccaggggctccgggccacactgtgggaggtttcaactcaatcatcgatggagacagggcaccaccaaccaggcggtgggaaacagcgcgattcactgtggtaggggcaggagctgaaaaccgcagctgcagaaccaaactagaagacggtgatgaacccccaaaccccagccacagactccagttgcactacacatccctggccccccaaataaaagcaaagtggccttaacatgttgctattagaaaaaagtggtgagtatgaagacatccgcccatcaccaaactgaccggtgcaaagagacgcttatgtttgtgcttgagaaatgagtaacaacagagaaataaaacaccgaacctgattcacagctgcagaacgggagggcagtctatgaaccccatccccagagtcggtggaggaacaggtggggtgaggggttccctggggaggggtcccccactctgagtttctcttaaagccggggacagataaggcaaaacatgaaactttaccccttgcaaagaaccgcacttttgtctgtgaagctttgccttggctgtttcctgaacctttacctttgcataagattgtttgggtatgttcatttgtgctttggggttttaaggcatgtctagttgactattgtatatttacatagctaatgtaattacagctaatcacataattgctggaaatgtgcataattgcctgatcccaacatataattataatgtatagcaacattatgaatcccatttttaaaatccacattttggggctatttaaagttatttattagaactgtttgtggactacctataggcaggcttcaactctgtttctttacgaagcgctcaaagtgctttaaaaaaacaaacaaaaacaaaacaagtcctgattttataatgcatctgtacaaagataggtgaaaagaaaacagctactcagaacaaaaacaaataaatcttaaataccaaacaaaaccatttgtcaacactctgtggattatgttctttcctcggggaaagagaaagtcactctctcatcctggaggctctgatgggtgtttgccaggcaaggaggctgctggaagaaggaaagagccagagggacttctagaccacttgggtaaccttgctgaccctggaggcgcctgtctttgttccttatacgtatggatgacctttcttgggggtacatcccactgacatgtgcttccaccatggcaagttcaacccactgagaagagcagaagagcccgcgacacagaagagacccactggggaaactcccttccacctcatccccggcagcatcttctcagacttctcatcctcctgcgacaaaggtgatgcagaatgagattcccagactttctaactatctatgtgtttcacagaaaccagcttgtctcctttttcctcatatccacccaaccagctcaacgttctcattccttttatcctctgtggtcgtgagaacattccagaggtgcggaatgtttcatgagcttgtttatttaagaggaggtcccttttatttttgcagaggaaatggagaagcaccctccctgagtcatgttacaaggggactactcacaactcagctgataccatcctcgggggaccattttccacgtctctaacacattcgaacaaaacgcagtaaaacgaaacacatacttttttcaagttgcaatcgcaacagccgcaggaaaggggagcagtgtttacagactgattctatcataatccacaagaagcagctctaacaaaaagttaccaccaacaacagccattgtggtttattaagttctacaaacccagggctctgcaagatgctcttctgggttccctttgcaatgctgagtgattgttagctagccctcatttccaaccaatagatgtttggggcaaaccaaaggagctctggcataatgcgataaagtaggtactaaaaccctccagctggtgcagttcacaatgtcaattatgtcagcagactaaacagataggaagatctccattatacttgagaatgaggagaccacaatcttgttctgatcagcctgtgttacgagagggctccttcgtaataattcttacatggtattataggattgcttgatagcaggcatcagaaaaaaaaggaacaattataaatagcaaactcaaagagttacattaaaaaaattaaaatgtggcttttacattggctagaaagaccattattccagctcatttggctggagtcccaaagactgtctgtgtcctgctctccgagtagagacacagcctggcggagtgaatccccacggcagattctgggcacacagaaggatcaagctccatgccactttttcttgctttgaaaagtttcaaagaggaaggggctggacaggccttagaaaacagggaaaggttgtacaagtatctgtgcaggggtgatgctcagattccagcggagtacctggagtgggaccctggagaggcctgcctgattccagcctagggacccacgaccagggcttgatgttggcattgtgtagcaggcgggaggggacgaattttaaggagctggtgtatccagacaccaagagcaggaagacaaagttcctacaagcctgggagcagaccgggtaagcacagcagaacatggcagcttcatgcttttaatcatttagaaagaaaaaaaaaacaaacctaagggacgcagaagtccctgtgtcaggtgtaggcagtggggagggagaaaaaaacagtttgacaggctctctgcatatcaatacagaacattctacaagtagttgatagaatagaaacatggtgagaattcaaagctagagggggtgtgtgtgtgtgtgtgtgtgtgtgtgtgtgtgtgtgtgtgtgtgtgtttgtgtgtgttagatgttcaaggccttcaggtggaagaaagagctgaatccaacaagctggtatgagagaaggccaaacagaaaaaaacagactgcccgggttcctgggtgcaaactgcctactgctcaacgcctctctggcagcacctgtgagatgggtgccacctgtcctgacccataacaggtgccacaaggactaagtcagcttatacataggaggagcaccaacaaagcacttgggaccaactgtgagtacttaatgagatgcctagggagctgacatatagatggtgacccacactggagtaactgcattttggcctgtctgcgttgatagttattgagaaatttaaaatatataactgcaaatgtatctggaacaccatgcatagacaaggtaatgcaaacttctgttataaaaaattggctgaaaatttcctattacacatgaagggggtgggaaggttggtgaaccatccttcagcacctgtctggatgggacagagggtctgcaagcagacaatggttttgcccaagtcaggtttatacagccatggaaacacacagaggaaacgctgctagctcttcaatcccattctagtttctgatgcaacatccctggagaatcctgggtgcagggggtggagtcagccccagaggcattcctgctagtaaccttggaaagctgagtcacgagcgtgttccagaagcaagtactcagtaacctcaatcaagcacctttacagtggaagtcaagagtaaattttacaactccccatacaatctggtgaacctatactgtggaatagtctacaaatcaatggggcctgggctcttcagtaagtccaatgtctctgaaagtcaaaaaagcccaggggataattttagactaaggagactagagagatgtaacaactaaacacaatgcgtgacccttatctattgcacaggcaaagagacgtggaggaaatgcgaatatgcagcctatactagacaatactgtccctgaggttagattcctggggttcattccggtactgggagcagtacgaaattggataaaaggtgccatgccataggtagtccagagtaaagtgctgcccctgaattttttcagatggttctggaagaaaatccatcatctactcacacagtgtctatttatatgtatatctctatctttatctcccctcaaaagaatctggaaaactgaatggaatattggtgttcactgtaccatcctaccaacctctctgtaggtttttataatttgtgaatgtttactttaaaaaaaccctttaacgccaaactccttatactgaaccccaggaatgtcagtgcttttgtgttcttgcagcgcagagttctgtgaggccatggagtcactcagcagaatgtctatgatgtccccaccccgtgtggcatgagccacatctacttataggacagacaattccatatgggcagctgcaggggaagccctgtgggttgcatattcctgtccacaaactggtgggtcagctactaaacttcagcgtgtgcgtgaagggtgcagagggggctgcggagccatcttcgcttccctccgagagccaccctgtagggcagtaccagcaatcaccctgagcaaagagcagccctgtagcactgaccccatctggcaggtgcactcacccctaaacccgaacccacacgctggtttcttaccacccgctagctggaagagcgcagtgcttaatcaacacttcagagttttgtccccaggtttccattagattttaattatgtttatttttcctttcatgaacagaacacttccagacatttccaaagataccagggacatgaacacaccacgaggggcaatgctgggctcttcaggaatctcatagtatcagggaattcagcattgtaaatatcttaatccaaaacaggtaaagtcctgagatttcaggaagtgaaaaaagatggtcctaatcaacaccatcttttatatgcaaaataaccttaggtacatggaagacatagacctcagggcccaccagccctgaaactgtcctcctagtccccaaccccgccccagaagccaggccttgtcctaagccaaggccaggcccacggccaaggacacccagcagagggtgccaatggtatgcagtgttggaatcggaggagggactctggcttggggagtggcacagccaactcaagggagcagccagcgaagatttgagtgagggactacgtatgtttggtaaaaaccgccaaacacgctcttaccttcacaaattctgtccaatcgctgtctcttgactttgtgcttatccacaagggccattctttatggaactttgcaactctcagatcaaaaggcaaagcagtcctctaagaacttaggggaacttgcaggagtctgcgtgcatgacgccactatgaaccctgaaacaaggagaaaagaatccttactctctggagaccctctgggcacaggacaacagctcactggggacttaactgctactttctataagggaacctgccatgcggacacatgggacttgctcttttcccaaagcactgggaatggaggctgcaccaagtgcatctcagccgcctcctgcttcttatctcataatagaaagcaagtgaatgcacacaagacaatcgtcagttatttctggaagcagcaaattccaacagatctcttgcttttaactttagggctataaattccaatttactgaccaatttgaagtgtaataaattatattccagtggcagagaccaagtgacagccagttggacctgccccaaacgcactcacactgagatgcagacgcacaccgtggcgactcgaggggctctgcgaaggcctgctgccaggtgagttacaacaatgctttccaaaacagccgcgcaggggtcaggggtcaaagccacagctcagcacaacacaaaaccctgactctaccacgtgagaacgcgggtgggaagccccagcagctcctaaccaacgttcctccgatgccgccttcctgaaccttccttgcagctggaggggaccgcagtcagcaccagcaagggcagggtcccaggctgctggccttgacacttggttccagctatatgggctgaagtatttcttagtgtgagagtgtaaccatccccatgacgtttcaggtagaggtgaggctgatggaggaggcaagaaaggtctcccatgtggtttggggtatgtgggattctctagagggagacctgactgcggcctggggaagaggagctgctgcccatcctccttctcaggaggatctgagcactttggaagcctctgactgtcaccaatgtgcccggtgaggtccagatcattaacagctgtccccaatatcccagcttttaagtcactgctctggaactgcattctttacattgattaaaggaggcttaatgaatcttggccaggcacggtggctcatgcctgtaagcccagaagtttgggaggccgaggcgggcagatcacctgaggtcaggagttcgagaccagcctggccaacatggtaaaatcccgtctctactaaaaatacaaaaattagccgggtatgctggcaggcacctgtaatcccagctacttgggaggctgaggcaaaagaatcacgtgaatctgggaggtggaggttgcagtgagctgaggttgtaccactgcactccaacctggtgacagagcaagactctgtctttaaaaaaaaaaaaaaaaaaaaaaaggtggcttgaatctcaactgggaaacaacatttaaggcccactctattgtcttctgtattttttttttcccaaggaatacaattaaatcagtcttattttaagaccaccaccacaaccacatacacacacacacacacacacacacacagaaaaagtggttctcagtgatctagcagaaagaaagaggagagataaagataaaaatgaggcccaaggggtagaaatgaggataatgatgtacggtcatcagttatgcaaaacattaagagttactttatcaaaaggtcagactgcaggtctaccaggtttctgtaagttaacggctaatttcccagcaacgaagctgaaaaggcatccgaaagatttatggcgataattacgtgattctccataaaagagctacgaaaaagcacaatttccaatcacataaataattaatgtaacatccctgagataccaaaccctttcaacgattgggaagttcccccaaaacggggactgaccatatcggatcagtcaggagatggaggttgtcatagaatgtgtggggttacccttgagcagatccatgtggacgtattttaaaaattggttttgctagtgttggcttttttatttttggtgagacagggtctgttcttcactcaggctggaatgcaggggcaagctcatggctcactgcagcctcaacctcccaggctcaagcaatcctcccacctcacctccttaataggtggtactacaggcatgtgccaacatgcctggctaatttttgtattttttgaagagatggggtttcacaccatgttgcccagactggtctcgaactcctgaactcaagtgatccacccacctcagcctcccaaagtgctgggattacaggtgtgagccactgcgcctagccagtgctgggctttctgaaaggtaaccacacaaaaaaagagtccctaactatagccaacttaagagttattggagtgggggcggggggccaaacctattgatctgagcttttgtccatccccaccccccccccccccacccacaagtgactctaggtgaggctgaccagggaggctcgggccagcaattgtcatttgctcaggcgcaagctctgatggtcaaactgcagtctggcccctccttgactctgttgtaaaaacagatttccacatcagctgcgtcatccaaggggggaagagaattaatcagttaatttttgtgaagacctcggagatgaaaaatgacagcattataatctgaggcaaggggggtttcacaccctcctcccccaacccccgagtgaggcgtaatcattccttttgctttcctttgaattttaatttgtataattagatggcttcctgaaaaattgataagtagaatctcaatcatgcaatcaaaggaaagatcagccatcagcttccacaaacgccaatattccactattaaaaaaaaaaaaagaggctgactcccatgtctggcttttttgggggtgggggtgggggaggggggtcactctgttctggaccttctgtgggttcctttctgcacaccccaggccagtggcaccgacccatgtttagggctggccatcttggctcccaaggccaccagcctctgggtctggtctgggcagtgaccattgacttgtgtagcctcaatcctctcccccgatatctcttgtgcaaaaagaatgtatgaaatgtgacattttcctccttagccctcccaaggagcaagctatttacgaggacttaattaacataaccatcttccaatgacagccacaggccctccttagagctgagctgcacacagcggcctccagctggtctccatgctgagcaagccagcacccccgatccacgctggctctgggctccctgacatcacagctctcttggtgatgcctgctatgaaaaccaggctccactcataaatcaatttttcccccctaaacaccaaacaatacgggcacaaataaggaaggaacaaaagcagagggaacgtgtttcactattccacttctgctgaaattgttcctcaaatcatgccaggggcggaatcgtgggtggagggagttctagaccccactcgtggaatgagcttggatgagctgttctggagactcaggctccttgtctgtagaatgggatgtcactgtgatgtcccagagtggcagtgaggaccagccagtgaggatatgcacaaaaacactcggtgggagcctgcaggtctctgtgagctgctcctgcctttcctttgacacccccttgcacactcatccccgcagcgaataatcattcccttctggctgaggctgggaggtaaacctcagtgaaggtcaaggtcaacaggaaagctgtatcttttcaaaaggaagaagagtgccctgaagccaaaccgcacaagaaacactacctcctcccaaaaggaaagttacgggtatcacaggccaaactccaaccaaagatcagaaacgtggaccttaaattttatttgctttaagtgagggctgtgatctagggctgaaatatttggtgccaagaaattcaactcatttctgaagatgaacaaggcttggaaaagaaagccacttgtagatacttggttgtttccagaggggacgggtatggaagatttgttccgtggaggtatcacagagaatgtgacatttttgaagacgtgagagaacaaaaaggaaaaacggcacattttacaaacccttgcttggctatcaaactccaacatatccagaatcaagggcaggggaaaggggagggttcccctcatcaagcacagtctaaaatctgggcaggttaattttactcaatgaccatcaccagctcctcgccaccatcatgaggttctctaccaagcgcccttaaggttacacagcacaaaaacctgggatcaactcagttttatagaccctctcgatttcttttctttttctatttctttttcttttttgagaaggagtcttgctctgtcgcccaggctggagtgcaggggcgcaatctgggctcactgcaagctccgcctcccaggttcacgccattctcctccctcacagcctcccgagtagctgggactacaagtgccgccaccacgcccggctactttttgtacttttagtagagactgggtttcaccgtgttagccaggatggtctcgatctcctgacctcgtgatctgtctgcctcagcctcccaaagtgctgggattataggtgtaagcaaccgtgcccggccgaccctctcgatttcttgactccacttcctagccttcatcaagaataggcagctgaagggatttatagagtaagtgcatgcctttgacagtgcctttcttcaaaatgaaatttctctcaaatccagttaaacatgatgatggctttcaattctttcaaggaaatctatttaaacattctgttaataaaggcagaccgagtttcacaatatgctcacaaattaatatcatcgtagttaagcaagtcctgccaaagttctctgagtgtgtccccggagaactcagatctcactgttaagcatgagtggggcgcagactttctgtttgagaggttgaggcgatccaatgcaggaagaaaagattccctgcaacccagatggccgcatcaatgcacaaggtccaccacccttctgagcctgggatcccaaacgacaggactcactcctggaaagcttccttcaccgcagcctacagggcctctcagtgcacccacaggctcatccaggagcctgtgcgaccactgtgccaagatgaggagacagcaacagtccaggcggtggtgacacccagctcttgcacacatagccgaggatcctgctggtgtggtgctggcggcacatctgcagatacggtgccagttaacagggccttgagaacgccagcccaccaatgacttctgcccagaaaacactctgacttttcatccggagttaacagccacatgtgctcaggccacctcaaaagagcacattccataggcttcagaagccaaacttgtgcaacagatgtctttcttaggaagagagctgggtagaatcttctgaacgggtgatgagcattttattttgtaaactacacttggaaaaaactactaaaaaccagatataagcagggcacagtggcgtgtgcctctagtctccctcctcagaaggctgagacgggcagctctcttgaggctgtgatgtgccacgatcgcacctgtgaataaagccactgcactccagcctgggccacccagtgagagcctgtctcaaacttaaagcaacagcaaagccagatataacaaaataaacgtcctaaaggagtcagggatcagtgggtcaaaaagcactggcccagcctttgattaaatggcaaccgcaacaccacaattaataacaaaattactaaaactgtactttaaaggaaggaaatgaagctttttgagaaaatcaggataggaaatgagcttaatggagccaattttcagaacggcagctatggaccgaatgcttgtgtaccctaaaattcttccatgctgaatgctggattcgtgaatgtgcaaaccctaatgcccacagtgattgtatctgggtgctgggcctctggaggtgattcatgaggctctgccctcaggaacaggattattacccagtccgtagtacccaatagatgatcttgctgccccacgcgaggatacagccaggaggtctacagccagcaagcaggccctcccagatcctggatctgccagatcattagttttacatttcctaggctccagagctgtgagaaataaagccactcagtcgatggtatttttcttacagcagcccgaactaagacaatggccaaaagtgaatattgcttcctgattatttattaatttttgcaaatttagttttatgtttttgggaattaagagggtgtctgacttcctatacactaccaataaagaggcgtacaggaaaatctccctctccaagggcccccataccatgccctaaaggtaactagcaggaccctttctttcttttttggagacagattctcactttgttgcccagggaatctcagctgactgcaacctccacttctcgagttcaagtgattctcctgctgtagcctcccaagtagctgggcacaagccaccaagcccagcaaatttttgtatttttagtagacacagggtttcaccacgttggccaggctggtctcaaactcctgacttcaggtgtcctgacccctcggcctcccaaagtgctgggattacaggcgtgagccaccaagcccagtcgtgaccctttctaatatacacattgaagtttcactctggttccaccatcaaagaaaggctagggagctcatatttccccagggagcacccagcagcccaaccccagagtgacatggtcacaccctggtcacatgccctcgatcagttccaagggccccaccctctaattccctagggctgatgcaatgcaggaaacccagctgtagccaacacagggctacaatccacttcccacaccccaaggctaggtatgctacagaattcacaagtgcttgggtttaaaaaaaaaatacatggcttccacaatctattacggtgtaccccccaaatcatctaaatgcctgtgccagaacagataatcatactgacccaactgcattaagaaagaatataaaaaatagactcaacaatttagggcaggtcaaattctgccgctatcagagtattttagaatttggatatgagggccaggcgtagtggctcatacctgtaatcctagcacactgggaggccaaggagggtggatcacatgaggtcagaagttcgagaccagcctggccaacatggtgaaaccccatctctactaaaaatacaaaaaattagccaggcatggtggtgcacgcctgtaatcccagctactggggaggctgaggcatgagaatcgcttgaacccaggaagtgtaggttgtagtcagctgagatcccgccactgcactccagcctgagtgacagagtgagactctatctcaaaaaaaaaaaaaaaaaagaatttggatatgaggctaaggaatgtggatctgtgattctgttctgtccatctaactcccaccaaaacattcttaggggctttgaaatgaccaaaaaattaaaagtgaagcccctgtaagttacacagagtaagaaacatcaaagaaatgtacacagcaagtctctgagcacatggagtcagtgctaggagagggcacactatgaggctctgggctgccacacagaaggaggtgagcaaatctaaaaaccaggctttcccttggccaacaaagctgagtaaatcctcccgttttggttaagggttgttagcacacgaaaatacatttcctcgtgttaaatgcaagactccaaaattctaaatattttcacttgctaaaagctataatcaagaacagaagacttgagcagaaagaatttgtgattttcctaattggttgtttgatttgtgtcataatggaaattaagtgttggtctttgttgctaaagaaaatgagccattcttgtgtttaggattttcacacagtttaaaagaacttgtcttccaaatatgccttaaaaataaactgtatattagttttaatagtgttatttaataataaaggttaagcaaaaaaaaagggataaaagcaaataagcaaacaaactaaatgacacctcttattcctgtctgtttagacttgaggaatcaggaatgcagatcaatttttccttttctagttttctctttcctactctggcatgaaaattttgatctgtagccgagaagactggttgaacagataaaaaaaattagtgatctcaaattttaggcagacagaagtggttccaccagaaaactcatcttttgttacatacagtgtgcaagaaatgattccagaatgtttatatctgaacgtcatgcagagaaactgggcacacacaatacaattgggcacacacaatacatctgctgtgtccagcatggtgtaaaagcacaggggactgatggccactaagggttttgaacttgaggacttgcaaaggcaagagccaccaagctacacttcttggagagaaatatctggaggttatatgctaaacctatgcaaaacttaatacaatttattagactatgtattcaactgtcaattgtaaccatattatagaacactgtgttatatgtatcatatagtatataataaattattaatgagataatgttaaacattgctgtcttaatatatgaaatgggggaagatttaatcctcctaacttttaattatttagcttacacttaacacatgaattgcccttgtatttaaatatcaaataaaggcaattataggaattagctacttatcaaacaaattgcaatgatgagatatgaatttgtaaaaaaaatcttcaggttagatttttaagatgtttgcctttgaattttgcctcagagaggcctggaatcctcgactgattttatggggcctctactgtccttaggggaacccaactggccttctgagatcccagcccactcatctcttgacaccgtagggtccagaatgcttgtataaggacatgctctctgcagtctctgcttgctctcaaaaccaatggaaacccccacgtgggctgaccttttcctgttgcagcccttcctgggagctggcccagcccaagggaggcctggtgtccagcgatggggccctttggccagcagagggcactgcacaccctgcatggccttccagaggctgcagagacagccatgagccaccatcctcatttctatcccaacttaagctctacaagcacctggagaaaataagatcagctactcctagaagggaaggcctgggcccatggatgagatgctgcatttccccgaaagttccagatgtgaaagaggcagaaggtctcaccgttccagcagcagatgcttcgtttctaggagcatgatatgccaggggaaaggggatgcagcgccagcgcctacttgtttatctcccgagacgctagctgggggtcccactttcacagcggagtgactggaggtacaggccaagaaggagggaggctccctgcccagggtgtggagtccccgaccccagggagccaggggccaccctgacaaatgatttttccattacgtctgctgacagcaaccagttagtgttgaaaattggaaacaacttggcagagacggaacacacacagagaggacggtgctggggaggggccggctgggctgctccgcaaatgccccttaggctttccattacaaatgacagcctctggagcactatgcacacctgatcaacaggctcaatttgactcaacaccaggatcagtttgctgtgagacaagtatgatcttaagatatacaactttttttcctggtagacactaatttagaaaggaaaggagatttttccaactttccccaggaattgattctggccagaatgcacattaatgtgctctctggcctcaatttgcccgcctgaccacagacacacacacacacacacacacacacacacacacacacacacacacgtccacctgaccacacacatacacacacaacacccctttcaccaagttctaagatgctggccacctcttctccacactggcagggtacctgacagtttctggttggagaagaatgggaggggctggtgtagcccactaatgccccactacgggagacagatgtgcctaattcagtccccaccgtcacaggacactctttcttaccatcatttcaaagtcgccacagttgtcacagcagcaggataccactgagtgatacagcacatgcttggcctgatttggcagaggatgcctttggatagaccccacacacgtgcggatcctggggagcccccacctgagctccggtgccacctcccccaggcagcgcctctccaccttctcttcatggctctgatgccacgaatacctcacaagcttgctccaagtcacattcagtgggacttgctttcactttccaggacgaggttcctctgtacaacccacttcagtgtggaaccttcagcaaggaatgagggctacatggtggccagggagaggtggagacccgcaggcatggtcgaagatggtgggaaaggggagttcaagctggacgggcagagataagctatcaaagcaaacgctggctgggctgccaagtgtccggagagattatctcaaaaacaagcaggaacggctccctccaaaggggcccacctgctgaaggagtggggacccagccttccaagttccatgccagccaagttatagagtcaaaccaaatcaagactcttgagccaccccgctccaactcttctgcccagcctgacgtgaccaggccagtgtagccaccgccccagtgcacagctcagctccccaaaccccacgtctgtggggccaactgtttaggacaccagtagtttgggcatgcactgggataaaagtgctccaggcacctggggtggcccatccttcatttcaactaaggcatcactcatcatgcaaaggctggcatccaggagagccaactcagacctcaggagtggaggattatgtttgctttatgagggcagatactctatgcctgggtccttacaagtatacacattccataatgcgtctctatcaccaaaagccgctctgcagcatcatggggcaccggtaccctgtctcctgcgacaggtcgtggaaatgatatgtagaaatcagacatccctaactccagaaaatctctagattcaaagacaccgcttcccagaccttatcttttcaacctgagtcataaagagaaaaatcttagtcttatccacagttatttaacatgaaataaaatagcttgcagctattcattttgcttaacacggttttcacgtggaagacggctacgtaacggaaacccagagggatgaaggctttgtttggtatccatgactgcacccaaagggagagcgggcgtctcgcagagtctgatggggaggaggagggtgggacactcccgtgtcacacaaattcatctttgcctatcaaatgccgggaaaaggaagggtgggggtgcggctcacaagagttcttttgtttctgttatggggtgtcgctggggttcagctgtcttcttgaatcatttcacctgtttcacagtggcttccagtcccggtctccaggtctctgacgagtacaccaccccattttaacactcatcatagctcagaatgttccaggctatagctaaaatataagttagtggaaagaggttgctggggaggagtagacaaggctcctgatgagaatcttctagagaactgcaaccttgtcataatgaactggggtcctcacaggcctcctgcaccaaagtcctctggagagggagacatctggatgaggagggtggatggtgcccatgaatacagtcacctatgtggagaattacagctcatcgtgagctaccatcagggatcctaattttacatgaaatcccactggagaattcttgacaaggtaatggccatttaaaaatctgctctgagacattttatggggatattgtgcatgttagagcccaagccagacaaataaatgggaaaaaaggtccgaggactcaggatacctggatcccaagtttatgtccccaccccagacaccattcgaaaacggtacatggagacccttagggaaaggcaggtccctggaggcccactcctcatgtacttcctgccatagtcatccaagcctgaacatttatggtcttgatgtcaattaagtccccaaagcaattaaaataccttttcaggccaggcatggtggctcacgcctgtaatcccagcactttgggaggccaaggtgggtggatcacttgaggtcaggagtttgagacaagcctggccaacatggcaaaaccccatctctactaaaaatacaaaaattagccaggtgtggtggtgggcacctgtaatcccagctactcaggaggctgaggcaggagaattgcttgaacccaggggacagagcttgcagtgaactgagatcacgccactgcacactagcctgggcaacagagtgagactctgtctcaaaatagaaaccaaccaaccaaaaaaaaaaaaaagaaaccttttcaattaaatgcccacaggtcacacactgactgttacaggttgaattatggacccccctaattatgttaaagttctaagccccaggacctcagaatggaaccttatttgaagataaggtcgttacagcggcaatcaaattaaacaggtcattagagtggactctaatccaagacgaatattctcataaaaaggaggacagttggacacttagacacagacagggggaagacgacgtgaagatggcatctaaaagctacggagacagggcttctctcaaatccttggaaggaagcacccctgcggatgccttatctcagacttccagcctctagaactctgagaaaacacatctctgtcctggcctgtctgtggaaccttctttcagcaacccgagcacgccaacacatgccaacagacgggaggctcgcacctatcggtgggggtctgcgctgctgagacctgcaagctcaggaccccccggcaggaagcctggttgtgatgcaggggcagcaatctgtgcagaatcctggctttattaaaaagctccaagtcaacccaagcctgctttatggggagaggcaaccttcaccctccaatctcgccccagacagctcaacacgcacggcctgaggtgtgcccgtggccatttcccagcagtggtcagaggggctgcaggtcccagagctgacccccacaacacgcagggagcagcctcctgagaggctcagacctgtgttcgccaggggagagacccaggagggaatgttctaaccttatttcccttaagctgttttctgtgctccatgtctgggatttcattgtttggaccgtcctgcctttgtgttgtctgtgttaacaacacccagaagattccatcagcctcatgccagggttgggagatcaaagaaaggtgatccccacacggcccacagaggagggaagaacctatcaagaacgcccttggggtccagcagcaaacggatggtgattgtgcctttgaatgcctcagtccgggctttgtgtatcatagtgtgggctccagcaggaatctggggtccacaatcacaggcaccatcggttcctgcttggcggcagccccaacacattcccatgggagcccagacggagcgcccactggatctcaggctggaattgggcgcttggatcaactccattcatatggctttgggacagccacgtgcatctccacacttcccaagttcatgggaaattttgagaaaaacttttctgactgtcaaagcattctctccggtccattctcaaattcttcccccagaatgaagtttatgaatacgcatcacgcagcatgcagccgctgaccccaagtgtacttatttcttcaaaacacagaactttaggagtacaaaaggcttattcgaagagagagaaaaaaaaagaaaacaaaaccccacacaacttccaggataattcaagcatgaatccacggggccaccgaagccaaggctgcccctcagggcaggtgcagcattctcccaggtttctggagtacgactgggggttcatctctggagggccggggctccctcacctccaggaaggatccagtgcattgtcaacacaaaggacatgggagcaggaggagcccactgaaaatgacccgccactctatcttttgaatggcaacctcactgcccgccgaacagagagcaagaggacacagtgaaaggtcttttgcagtccagattcttgcagcccctcctggcatcccccaacacagcagtgcaaggaaggccctctgtcctctccaggcccctcccagaggttctcccagggaggacacccagggatgagtggctcctgggctcagcctgctccactcccaaggcccttgggaaatcaacaggctcagctcaagagaggcagagaaggggtgaggctaataggttttggtttttggaaggtctgaggttagaccctctgggcttcagagacagcacttcagatgatgccggggtgaacatctcagacacgctcctgaagatgggaggggagatctcagcccagagccgaaggtgtagacgggtctgatgagtgggaagacaggaagggaaatgggaacttcacttggaaaaggagagatgccacatagttccgaagggcagggcactggccacagactgcccttcatgcccagctccacaagaaaccagggacccggcagaggatcagattccacacagggaccctcactgaggttgcacacacattatctcagtgacctttccagcccctacaggacttctggggaatccgaagccggatagctctgcacagccacccaccggtgacacaggcgtgcccacaaaacagtagagggccatgaattgagggccatggaggcttttctgaatcactgcccctccccagaggcccactgagagctttccaagctgaacatgaccctctccctgaataaggcagatcccatctacactgtggatgccagaaaaagaatcaatcccatggcccccggggacccccaaccttttggaattcatgtccttgtacaagctctgcttctaaacaaacagtaaacagtatacacaggtgaggggatgtcacttctgagattaggttaaaagagactgtggctaccagtgtgggcatcctcccatcttccctgccaacttccctccctcccagaggccagctgccatgccagctgccctaaggagagacccacggaacaggaaaccaaggccctcagtcccaacagtccatgagaagctgaaccctccccgagccgggccttcagatgagaccacaaccccactgacatcctgaatgcaacattgtcagggccctagcaggaggcaccaagctaagctgtgcaggttcctgtcccatagacagtgcaagacaataaagttttgttgttttaagcctttacattttgaggtaatttgtcacacagcaatagataactaatacaaccctttacacaaactatcacactgactatggtcactgacacagtacagttcaacagaaaagataaaaacagtaatacatttgtaatgcatggcgtctagtttatactacctacaggacagagaacactaacaaaaaacaagcgaaaccctctaaatcctccgctgcccagactgacatgaggtctgtgatatatccacttctgtaaactcttggggtaaacgctattctcctcacaacagcaatgcgtacaagctgaaggaacggaaagtctgctgttatgttcacttaccccagatgcttaaaataaattccagggctacgctcaacatgcacagagttaactcaggcaccctggggtctccactctgactcacgcacacccataaatctggggaacattaaaaagatctatcagagcctgggccccacattaagaatgcagcctcctagacccccctctgaatggtaattcactgggtaaacagaccttcttgctttttcttaaaagtggtccttgaactgcagctacgattaagtctgagctctcagagaaaaagagcatgtaggtaaatattgaaggcagtctgcacagaggttcagggcacaaacacagccgcttctgagacagggaacaccatgagccgaggcaggagctggcctcaactgcaacacaaggggcagaaatgggaaggctgcaaaaaccacgcaggtgccatgccctcatgtgcccagatgcttgggtggccctggatgatttcctaggatcacggcatttctggagccttctgagattgtagaggtcaccaaatccaaacttcagagaacctgagactcaacatggccaggtcactcctagtcctatgtccttaggaccccgatgtacatctcccgctcccccagaagcagcactgcagaggcttgtggagtcagactgagccacaccagccagatgcaaaacacggctacgtctcacaaagccacaccccacaatccccgaaccacactccaagggagagctctccagagcagacacagaacatctgcagaagcaaaaagccagactagcatgtaaaatcatgaaaagaaaaaaatcaaagaggcaggtagacacatacccaactgttggcaggggagtccctctgaggagtgggactgtgggaaggaggaggctccaagaggctggaacgctttttagctgcatgcatgactttaaaagcagctaactggccaggcgtggcagctcacacctgcaatcccagcactttgggaggccgaggtgggcagatcatgagtccaggagttcgagaccagcctggccaacatggtgaaaccccgtgtgtactaaaaatacaaaaactagccaggtgtggtggcacgtgcctgtagtcccagctactcaggaggctaaggcaggagaattgcttcagcctgacaggcagaggttacagtgtgccgagatcacgccactgcactccagcctgggcaatacagcgagattgtgtctcaaaaataaaaataataataataataataatagtaataataataataataactaataaacaaaagcagctaccacttctagaatgctccatgtgcgatgagaactattctaagcggctgtgagtagtaactgacacaatgcataagcagccagcaattccattctgctgggctggtttgcacagtgaaggcgtgcacgccatggaggaggacacgcccagcacagatgtctgtcagctctggatgaggcttcaggtgagtccccgaaacctcaggtgcaggcaggatacacacactccccctccaccccagatgccttcagaagagtgtgccattggctctaaggagcccaggaggcccagagcctgtaagataacatcacaacacagcggcccaggagtcagggtcatctgctgaaaactcactccctctagtcacccgccagccccacagctgctctttgtgcctcagcttcatggaaaggttaaatgaccaacgccatcctcctgcctctagaacggccacagagtcaggtcagatgacagtctgcactcttagtcgagggatgttggctacagaaacttccgtggccttaggacctccaactccatcgctcccaaccccatcacgggcagcaatgcggacaggtcacacaagtgccatggggacccacctcccagtccgtgtctgtggccccagtgcttgatgagctgtgtgatcagagcatgtatccacaggcagagctctggaaggttctctccgagggacctgttgagcccctcattgctttctccatcacaccttcccgaggaagacacaagggtccctctgtccccggggtacacagggcagcccccagccggggaagcatgcctctctgccctctgggttgggctccgttccccatgccaggtcctgggggcaggagggagacagcaaggccagaaggcagtgcaatcttattcccagagaggcacccaggaagggttaaacggattgttagagacaaaaccgatgaaaacgacttcaacacaatctgatgaggtcagcgagtagagaggccctaatgacacttgtaagaaaaaacatctgttggtgtcaaaaggtcagcaggaagtgagtgggatttacgtggctgggattggccagaccagcactcctcgaaagagagacacacacatggcttaacttagcctgagaggaacaacaaaaacccctttcaattgtcctgtgaccagcccccgcctccctctaaacaacaggccaaaccccgagctatgaaatccgtctgggcccctgactggcaattagctctttgtccattcactgatcggccactgaggcccagactccccccgactgagtcttttggggatgacgtttttgctgtgagtgcgtatcccttttccaggccacagaatctccagcttgactttttccttggaacacaaagagggtcacttgaatagcaaatgtttcaataaatccatcatcacaaaaaccaaaacaagaagtttctctggaaaaacaggaagtcctggtacacagcgtggcttaaaatagggcctgtttcatttgttgacaaaactccagcctctggaagcctcttggaggagctttgtctgagatccagcttaccttttaaacactccttcagtaaaaagcatcccagtgcttcgggcaacagactggcctggacttcgttacactctgacgcaggtcacaggtctgggtcctggccgtcccacttcctgtccacaggcccccaagagggtctcacgggaagccaggctcagggccgtggcaggaatgaggcctggtgctttcatgccatcaacgagctgggtggcgggaggtgctttttcagccttctcctctaaagcatttctaacttggaggcctctcggagttagtattctgcttgttctttatgaactgttacagagttttacaggagccctgacggggagaaactcttggactgtcacctgaacttgaccactgtgcagtaggcaaagtggaggtcccagttgcacccagccagcctggaatatgcagctgcgccctccccaaagtcacccactataaagaatacaggcaccagaaaactccagaaagatgttaaaagttcttcacgtgatacgattgcacacacagtgctgcgtcctcacaagatgcctcctgggcaccgtcccataaaggtgctctcacctgatctaaccatccattcctctccccctgagttttgccttttccaagctaaccgccaaggatctggaggacggtgttcacacagcgaggcatgggcgtgtgtcgcaactattcccctgttgaaatgtgaagccacggccgggcgcggtggcttacacctgtaatcccagcactttgggaggctgaggcgggcagatcacctgaggtcaggagtttgagaccagcctggccaacatggcaaaaccccaactctactaaaaatacaaagattagtcaggtgtggtggcgcggtgggcagatcacctgaggccgggagttcgagactagcccggccaacatgacgaaacccgtctctactaaaaatacaaaaattagccaggtgtggtggcacacacctgtaatctccacaactcaggacgctgaggcagaagaatcatttgaacccgggaggcggtggctgcagtgaaccaagattatgccactgcactccagcctgggcgacagggtgagactctgtctcaaaataaaaaggcacagagagatcagagaatcaagtctaccaaattcttcacacggagattccaccaccaccaaaagcacatccccacggtcaggcaggtgacgaggaccttcaggagatttccttaccactaggatgggcagggggaggcttctgcatggataccggaggctcactgcgtgaaccttctggagacggcactgtcacttttgtctcctttgctggtgctaaacaaagtgtgggcggtgggggtgggaggcgtgtttaagtaaaaaggagacacaagcaatgctagttgtttcaggatcctgctgggttttgttggcttatagaggagaaaatcagcgatatgaaggtacgtgaggggtaagacatacgcaatttcacttcagaaatgtgaattgaggccgggcatggtgtttcacgcttggaatcccagcactttgggaggctgaggcgggcaggtcacttgaggtcaggagttcaacaccaacctggccaacatagcaaaaccccgtctctacttaaaatacaaaaaattagccgggtgtggtggtgcacgcctgtaatcccagctactcgggaggctgaagcattagaatggcttgaacctgggaggtggaggttgcagtgagcagagattgcatcactgcactccagccaaaagtgacatgatttagatggaatttactccagacccaaggcttgtcaccaccaacccatcctgatccacacctgacctggacccattagcctaatgtccacgctaagattttcacactgttttttgacgtcgaccccagaagccatgctccaaggccactgacactgcatcagtgggcagctcagtgtgctgcccctctcgccccgccaatttcctgcccgcccacccccaccagctccaggaggcggaatctgtcagcttgtcagcgtttgtctggattcactgggagtcaggaaggggcctgtttgggagcttgtgttgggtctggctttgctgatcttttgtggggagacacttaggatgaaatggggtaaaggacagaaaaggctcacctgcaggacctcgcgggttagccacgagtctgacacacctgagcctgccccactgcccatccctggagtcatccttcccgggggccaaaggctcttccatgtcactttagttatcatatggcgggcagattcgaaccgtctatcccagtcactcttttgaagagtgaacaatatggagaatgtgaacatatgtggccacgcagctgatgtacacaagcattccccacagccatttattttaaggcaccgtgtgctatttttatcctccacagaaatgctgccaagggaatccgcagaggaaaacaaagctctggagctgagcgggttactctgacttcactcttcacacgacaaatgatcatagcatactatttgccaccttgtctcagagacaaatgtcatgaaataagtcactcgtcattatttgagttcaagtactttttcttaaaacatggcttttaaacagaaatgcatttttccttaactactggtcatgatattccattccccccacgtgtgtgtgtgtgtgtgtgtgtgtgtgtgtgtgtgtgtacatgtgtgtgtctgttgcggcttacctgcaacactggttctgagcaagtgaaaaacttgcaaatgtgttgtggaagagaatggcaatgctcatccccagcagggaacgttcccgagtttccatctctgcctgtgattatgtgcagggcagtcatgcggaagagggattgggtgtattctgcgtgggcagaaccatgaccaggagagaggggaagccaagaggagagattgcagatggataaagaagtttctcacagtcgaggaataagaagcacacgggcaggcttccccagagaggccggtgccccaacctagaggacacgaagccgaggccaggactgtggaccgcagctggagacccctcttgacccgcgggggctggtgtgctaaggtgcaaagggaggaaagagcaacatgcagggtgacacctgcagacagttctccctgttctggaatcttccggtcggccccaggggtgcacgctagggcagcccatagccagcccctgctagatcccggctcccggcaaccctcaatgctgaactctcccaggattcctgcggtggcaaacagccctggtatgtaccattttattttcactcaaaacatccttcctgggaccatcccagcaagctgagcatactattttcaactaaggccctggcattgtctaggaatgttttcagggctaagcaaattgctaaagcaaacatcttattttcgtctgcaaggacagccaagcgctgtaaaaatacttcccgataggacttccagtggaacggccccctctggtggcgctgttggcaccagacactctggttcaggggaaagctctcgctgggcatccggggcgacacccacacttcccttgacggtggctccactggcagccgccctgctccacacccctagctgccccaggggaaggccagagaaggcctgtggacaggaaggggtacaggccctgcagcgccaggaacaggacctccctcacctctcctcctccttgctccaaggaacagccagtttgacaccaaatcccacacatcccagttccaggagtggcctgggactcagacaccaggtgatctgggtatgggaggatataacagcgtctacggcagcaaagcctgaggcccccacaccaagccagaggcaactgagagctggtaccacaggccagacggagcccccgtgcagcatcctggacctgtgagctggcctgcattcctgggttctcagatgcacctcggtgaggtgccacctcctcacggtcactgcaactgtcacacccttactgagaggagcagctgtagcaataagcaggctccccggctcacggcatcctggacactgttcccgtcactttgcatgaattcactcattcctcccaacagtcttaggaaccaggtatgctttcctcatctaaaatgactaaacagaggcccagggtagaaaacaacgggccaaagacacagctggggtggaggtgggaccgaagccgggtagcccagggatcgtccacgccctgagtttgtgatggacctaaactcctgtgtgtttcacttcctgtttcaattgctaaaccgagagggcccttagcgactgctcccaccagggctggagaagcagaacccagcggactcaaaacggtgcctacaggggaaaacggggtgagcaggggacgactgagtccagcctcggttctggactactagaaagaggtgcccctgaatggggggacacaggggtgctctcaaaactcagcaaatgttagtccttttattttaggaaaatacactgaactatttgttgatgtaatagaagctagggtttactgtataatggcctagtagggtgtgtctgtaagagaacgcacgtgaaatgagggtgatgaggacatctgcttttttaagtctgtcctgtttaaagctctaacactgtaacgtggggacaactctgaaggctgcggggaggttctgggacagcagacacccgctggcagcacgcagcagaactcagcgcgaggggttagagttagggttagggtcgctgccatcagtaataaaaaatacggagggaccgggtgcggtagctcacacctataatcccagcactttgggaagccaaggcagctggatcacctgaggtcagtttaagaccagcctggtcaacatgatgaaacctcctctctactaaaaatacaaaaaattagccgggtgcggtggcacacgcctgtaatcccagctactcaggagggttgaggcaggataatctcttgaacctgggagatggaggttgcactgagctgagattgcgccactgggcgcctgggcaacaaagcgagactctatctcaaaaaaataaaataaaataaaaaataaaccactgagggcacccaaggaacaacatctgctgtgcacccgttttcctaatggccccaagagaggctggctgaacagacaactatgctcagatgatctttctggcgttccagtgagcaggctgggcctccacaggaagagagctcagccaaagaaaggacagctccccagcagcgaggcagggccctgggcagctgtgcacagcctcggccagcctcgagctggacctcagccgcaactgtgtgctgtgctaaatggccatcattggtggaaccaaaaacgaacaatgggaaaattatcacattatccttctacgaagcaatctggaaagctaattacgtgttactctgcgcacatcttcatctctgatgtggaaacagcatgggcgaatcggtctggtggggaaaaacatcatacttaagaaatacggagaatttatttctccgcaagccacatacgtgttttaccccacacgtcatgaggcctgtggcaccccgatggggactgagcattcactcttctgcccacgtgaggaaccaacaaaagctggcaaggacaccccaggataacacccaaacacgtcgactcgtgcgaaaggcctcatgcacgatcctttcttgctgtggcaaaaccgttaagtttctctcaacacacacaaaaccgaagtaaaatgctcatcctctggctcccctacagtagtaaaaattaattgccacataaaattgctgattcctaccaaatgaagctgtacgatttatcagctcatggatggcgcaaactcaatggtggtttaactacatcacctgagttattgctgtgttttctctcagtgacagctttacggggaatgtaagttttgcgaattcattcatgtaggacaaacttccaaagtaaacaaaagcattaagcagacacagctctcccgtggctatgtcacagcgattctcaaagccacagggtgtctgggcaagaagggtggacaccccgtgtagggacccctgcagcaactccatcaggcacggttttcccccacccccaggctgcagtgccaccttccaggggtgctctctgctgaagccctcaaccccccgcaccccaactttagaggccatcgtaatttaattatccaactccaattccacataggaatccagttatttaaaatgcattaaaaaaataaatcactgccagtaggttttgtatttttggccaggacaaagaatttataaacagcttatatatatggtgtggaagacagttagatggtgaatacctcagggaacaccatagtctcctcggttttcaccagagtttgcctgggagccgggacatccctatcattttatgggctatttctgttttcttcatcatttgtcccctgtccattagacaacaatggattgatctttttctaatctgaattaggccaggcacaaacaggtaagttaccttccggtttccataattacgggaacaggcaagtacttcttccaaactcaggccttcagagaaaaataactgtggtgggaggggtgcaatccctggggaaacagcgttcttggtgaggacaatgctgaggtcacccatcggtctccgaagaatagcagttctacttctcaagggaagagagccccaactctaagaatttcaggtacatgaaaaaaaagtgccacaatccattgtccaagtttgccttatgttctatttatagtcagagtgcgtgctctgaatctgttttagaatcatgttcttcaggacaacttgaaataaaaatcagagaagtttagtttcaaaaaaggcagagaggtgactatccacccaggagacttcacccattcccgccacgccagtgtccccagtcagccttgaccctgcttccctgactgtgtagtgagatgtggggattcagcccaaggcttgtggttaaagacagaggaagaaaagacaaagaatgaaacctttctggtttggtgacttagctcagagctggtctggctcttctctactttcttgccaagttttgcatatttgggatttcagtttcacaagcttccccacctcactggttttactgcttaacgagcagagaatatgctctaatgattatctgaaacacacccacaggtaaccacaactgtttcacacagaacaggaaatgcccagcaaagaaactctcacttgatgatgaaatgtttgccactagaaaatacatcgtactgtccccattccatgggctccccaaaccactctgcacaaaaactgtggttgcggaggggctgcttgacagactgttctttgactgggctcttcaggttccagtctttccagggaggtccagccatcatcagatccaaatggaagtcttgcaactggggcactctgcttgaactcaaatgcccccaacaagagccttgttctctttgtgatgatttcctgtgctgcacacatgaatctgtgcttttctcaatgtgcactttttaaaaaattgaaaacaacccaaggatgagtcaacattttaatgcagctcatacctgactgtcaacttcagcaaaataaagggaaggaagagcaaagcccgcaggggctttggggaaggcgaggtggcgaagggaagaggcaggatccggctaacaaatgccagtatcagggaaataccaagtccacatcctgcgcagtcagctccccaggatttgtttttgtgggtctctgagctgagagctaagggggccggagggagaaagtgggaggtaaagttagaggagggactcactgtaggagcacactgccagctcttgtggccagccccagtggaaaagaaatcccactaaatttacatccattcgtgctccatatgaagaagctgagggtcactgtcctcttctagctatttcattcagctggctttccagtctatcagaaaaatgccatcatcggctgggtgtggtgactctcacctataatcccaacactttgggaggctgaggtgggcggatagcttgagcctaggatagcttgagaccagcctgggcaacatggcgaaaccctgtcctaagaaaaatacaaaaattagcctggcttggtggcatgcgcctgtaatcccagctacccaggtggctgaggtgggaggatcgcttgagcccagaaggcagaggttacagtgagccctgattgtgccatggcactctagccaaaaaaaaaaagccgtcatcttcttgatggtgaactccctctaatgctcaggctgatgtcctaacacccaggacaacgtctgagtgaccagtggctcttggctgagggatgtgagctatgagcccctacatcacagcttctgttaacatggcgatggctaggcacaggcagccacccctctaccaagccacatcccaaatcctaaccccagcagagccagagactcaatgctttgtgtcacatggagctaccaacatcaggaccagcgagaaatcgggaaaacatcaagtcagaacgtcccgtgccttctaagcagtcaggtgcatgcaccatgctaggtgagtgcagggcaggaacggaaggcaagcagggtgcgcagatgtaacgggggaagcaggcacggccaagcaccctagaaagtgctgtcatgtttcgtacaggagcctgctgggggtagctcacggggactggaagcatggccctgaagtgtgggcagcatcttttctgtttgcacgactcaaagtctgcctggtggaggagggtgacacctgcacagaagccagggagcacagtgcaccaaccttcagtgtaatctccagtcctgccactgactcgtgagctgtgtgactctgggtacatcacctgagcccttcacacctgggggtttcttatccataaatggaacgacctcaccagaattttaaaatgtaacaaaaaaggaactagcccatgtgtcgatcagtaaatgcctcagggtgaactcgagaatccagaagtctccagggaagcccagtgtgtgcgacgtgcctcttcctatctcccctgggcagtcttcccagctccatggaaaagtctttggtcagctgaacgcaggcaaggctgctgaattcctgaagtccccgcctgaccaccaggcccaggtataagggaagggcgactcctactgatggacaaccagacaccccccacgtccacctgctatgtggggcgattcattattggccggcaaaggcttacacttttttctttcaagaatttttttatttagagattacacaaaaaaagtcttctgtgaaacccataacccagcccaggaatgagaaaaacatcacacaaactgcagtagagggacaatccacaaaatatactatcataatcaaaactgtcaaggtcatcaaaaataaggaaagactgtgaaactgccaccgccatgtggggcctaaggagaaagacagtgacatacaaggtgaaaaactggacaggattctgggatggaaaaaggatatcagatcatcagaatacaatgtagacttcagttaatattaatgtattgataattggttcattaattttaataaatgtctcatactaatgtaatgtcaaatgataataaggaaactaggtgaggagatacggaactctccatgtaaccttctagacgtttctgtaaatcaaactgttcttaaaaatatccatttagaagggaaaaaactgcttttatatatgccatttatcaaacttcttatcttaccatctcaaaacccaggcaaaggatataatgtaaaccaaaatatgagagaaatcaaaggaaaatattaatggcacgcataaccctcattctctttctctcaaagcagtaagttatagcaagtgtcagctgtcagtctgtgcacgtagcctttagttcaaggaaggccctgacctgtacactgacccaagcatcaagtcccatgggcagggcccatggtgggactccctgacccgcgtcattctgtgccctcacctctgaagccgccaagtgcagtgtctgcccaagaagccaccgggctgcagacccagggcgggtccgatgtataccctaggaggcacccccaatttcacctctccttggtgggcctctcacctgtccacttgccacaggatctacctgccctctggtgccaagcaacaacggatgaatacccactacctccagacagtcagatgggcctcaactcagccccaacaagcagccagaaagcaaagcgaggaagatgacagccaatttcaccatgcggcccaggcccacagactccagaggattttgggaagcttcacagctgcaccagagttctgccccacgaccatcctgatctgcgaaggacacgtccattctgaccacagatgttcactgagcctctgctaggcacagggtgaacaccatacaatgaccattcccaaattcaggagtgtgaaacttcatctacattaaagaattcaaactacgtagacagggagttatataaaccaaaagaaaatgttaatttgcacacataaccccatcccctttctctcaaaatagcaagttataaaaatctagaaagtagagaacattttatttgcagtttggataacctaaggtttactgagcaatgaaactgagaatgtttccactaacacacaggccacaggtttcagggcagcaggaaggccaggaaggagcaagtgtcctggaggtggcagctttgtctctataccacaccacagatgctggctgtcccggaacaagatggccagggtgcaaaggtcttagtgccatggccgagacaactactgggtttcccagtgtggtcccttgggtgagggagctgcagaggactcatcagcaccctatgcagaggggtttctgagcacaggaccaggccctggaaggtgggagtcttgagaccagcagggctgcaggaggtactccctgagtcacctattcccttgcaacttggaggtcagggttgctttgccctgctgggggaatctgcccctgctgtctccgaggccccactctcccctcagccagctggagcaccgggttctcctttggatcctgacacgcgaccttagacaacttattttactgctgatcctcccatcgcaggctggggcagggagatcagctacaggaacagaagggaacgatgcactcacagggctggggtagagctggtgcccacccccaccactagccaaacagtctcggggctggcctcttccaggggcctttctcaggaccaagggtttcctgttccctgcctgtcttggctgagtgaccacctcccctaatagctgcctgccagccagctcctacaaatcaggaccttctattgacaacactacaaattgcgttatgattttataaagctttaaattccaaaatcagtattggaattagtccaacttgtaaacgcccacaatgatgagtttcaaacacacaaaaatactgcctatggccaagtgcggtggctcacacccgttatcccagcactttgggaggccgaggtgcgtggatcaactgaggttgggagttcaagaccagcctggccaacatggtgaaaccccatctctactgaaaatacaaaaattagctgggcgttgtggtgcacacctgtaatcccagctactcaggaggctgaggcaggagaactgccacgaacccaggaggcagaggttgtagtgagcctgagatcgtgccattgcacaccagcctgggcgacagagtgagacttcatctcaaacaaacaagaaaacaaaattactggctgaaagtttccattaagacaagcttgttttccaatattaaatccccaagccaggacacggtcatttctgtttgttgtgccatctaatcaggacatggagatttctgctgagagtctcccctttaatggaggttctcacagagtattttgttgtttccctactccccaactccaccaccatcaggaagttgacagaaagtaaagatgtaaaattacttccttttccataccctgcccccctcccccccccacacaaaccccaaaagaagtgaatatagaaagataaaaagttaccctaagtaactacagactttggataacaatggatcaattactttgggaggcctagctgggccaatcacttgagctcagcagttttatatatatatatgggtcattaattgtaacaaatgcatcataccggctgggcacgggtggctcaggcctgtagtcccagcactttgggaggccgaggcaggcggatcacaaagtcaggagatctacaccaccctggctaacaaggtgaaacccggtctctactaaaaatacaaaaaattagccaggtgtggtggcacgtgcctgcaggcccagatacttgggaggctgaggcaggagaatcccttgaactggggaggcagatgttgcagtgagccgagatcgtgccactgcactccagcctgagtgacagagagagactctgtctcaaacaaacaaacaaaaaacaaatgtatcgtactaatgtaagatgttaattatagggaaaggccaggtggggtggctcatgcctgtaatcccagagctttgggaggctgagccggcaggatagcttgagtccagaaactacagacttcagcgagctatgatggggccactacattccagcctgggtgacagtgagactcaatttctaaaaaatgataatgataataataataataatgattaccaattttaatacggaaaactgggtgtgaggtatatgaaatctgtattatcatcacaatttttatgtaaatctaaaattttttctattttttgagagggagtctcgttctgttgcccaggctggagtgcagtggtgtgatctcagctcactgcagcctccgcttctggagttcaagtgattctcctgcctcagcctcccaagttgctgggattacaggcatctgccgccacgcccggctaattttgtatttttagtagaggcaggatttcacgttggccaggctgctctcagtctcccaaagtgccaggattacgggtgcgagccaccatgcttggcctaaaatttttctaaaataaaaactttttaaccaaagaaaaaaagaaaatcacccacttccctcacactgcattcctgcaaagacaaaatgccccgtatgcggtgattgcttccctccccaattctgagcagatgctgctctctgttgcatggaagcatattccaggcacatccagatgctcccgagccgtgtgccagggctgccacgacctcgtatctgtgccccactcacccatgcaaccaccgcctgctgagaggggaaacagaggcagcgaggggcaggctccctgctctgggaagggaaggagcatttgcgggaaggcccaagaacatgagagcctggttgaaggccactggacggcccttggcactggactagggggccagccagggattcagggatgatggaaaaaccaggaaatattaataaaatgcagaacacttgctgtgtgctcctgatggaggaagcagcaaagccggctaacaaattggtcattggtacagtgagcctgagcccaagtgggacaggaaattaatccaacatgctgaagacctgagttccaactgctggaacaaggcgaaggggtcccaccccaaaagtgaagtaagacctgaaagatggcagtaaaaacttacaagatgcaaattaaaacagagctaatggtgatgacagctggccaaggaacaggagaatggaccagtccgccaggttttgaagagcttttttagaaagcaaggctgactagagccagtgaagaataaaacgcttagaagaaagacagtaactctctaaaaccatagttaatggtccaatggttcttccttccatcacaaaaccaaattcccagataccgtgaaatgcgtaccaccacccccaaacattcccaaagcagaccctgcacctttgcaaatgctgcagattaagaaacagaggatgcaagcaggaaacggaatctggcaactgttgttgaggggaatgggccggaacagtcagctgcccgcagggtacttggtggaagacaagaggtcaagacaggcacttcctctgggctgagggtggccagtctgggccctagacatccacaccatggacaaaccctgagacctggacatgggcttttctggccagaacataatccacatacatggccgggcacggtggctcacgaggtcaggagttcgagaccagcctggccaatatggtgaaaccccatctctactaaaaatacaaaaattagccaggcatggtggcgtgcgcctgtagttccagctactcgggaggctgtggttgcagtgagccaagatggcgccactgcactccagcctggagagactccgtctcaaaaaagaaaaaggaatccacgtacagctcctatctgtcctgcaagaaaaggaaattgacgaagctgggtgcagtgactcacgtctgtaattccagcattttgagaggccaaggtgggtgaattacctgaggtcaggagtttgacaccagccttgccaacatggtgaaacctcatctctactaaaaacaaaaacaattagtcaggtgtgatggcaggcgcctgtaatcccaggtcctcgggagactgaggcaagagaattgctctaacctgggaagcggaggctgcagtgagccaggattgcaccactgcactccagcctggacaacagagtgcagagtgagactctgtctcaaaaaagaaaagaaaaaaaaaaaaaaaaaaaaaaaggaaactgacaagaaggccaaaacaaagaaacagatgccaattgcttggggccctcatggtagctggggaggaactaccacctaccactggcatggctgattccccaagtaactgcctgcaggtccctggagcacacacaggatcttgtagcaggacctgcaggctcaaatcaagtaaaagctagtctcagatattcagtatgttccccttgatacatgtctcaggactaattattttacaaggccccaaatcactaacaaaactgttgactacagttttggcaatcatcatttaagtcattactaacggttggatgcaataaatagagatgacagaatggcaaacagctgagatcccacctccagagcccaagaacacagtgtcagagaaagctaacagccacagcagttccacgccggctcgcccaagtcttcagatgtggccctgcccaataaatcagtgtctgcaatggcaagggccactctcttacattttacatcatctttctttcttaatctcaatgttgatgatgtccacttagaagctcaaaaacacgatgagatttcttcaatggcttctgcatctctcttttttttgagatggagtctccctctgtcgccaggctggagtgcagtgacgccatcttggctcaccgcagcctcccgagttcaattgaccaggttcaagcgattctcctgcctcaggctcctgagtaactggaattacaagcgtgcaccaccacacccagctatattttgtatttttagtagagacagggcttcaccatgttggccaggctggtcaactcttgacctcaagtgatccgcccgccttggccccccaaagtgctgggattacaggcgtgagccatcatgcatggctggtttctgcacctctttcaaatgggatttattttttaaagtaagataaacatgttaataaaattggaaaccgatttgtacgtggcaaacaatttttaggtggaaagtcaactgccttgattcatataggcatttatacaaattgttatggctatagcagctaagtttcaccaaaaagaaagatacaagtaaatttctcttagaacatagtgaagttcaccaggactggacacataaaatggccagcatctctgcgtgctgccccccggaaagggtccggacatggcgacatatgagagggaaaactcctcccaatcagggtctggtgctggttggagtctgtctgatgtcatctttcccaggacggtctgttcttactcccacggcccaggcgtggaaaccgtgaaccctgatcttcaatcccacccagcaccacagaatgctggggatgttctcagtacctgttcagctgtatctctccccctcagcactgttggtattttaggcttaacaattatttgtggtggggggccttcctgtgcattgtggtatgttcataagcctggcctctaccctctagataccagcagcattccccctctctgaatatgataatcagtccctcaaggcaaagtctcctgaaagcagcagctacatgaaggtctcagagaatatagtgaacataaggaagaatgtaacaaaatagctcagggcaacaaggatcccctgcagacaattggctgtaggcaatgacctgtctggtgcaccatgaagacctagctgggatgcaccctctgcagtgaacactgtctttttttctttctttttctttgagacagagttttgcacttttcacccaggctggagtgcagtggtgcattctctgctcactgcaacctctgcctcgcgggttcaagcgattctcctgcctcagcctcctgagtagctgggatcacaggcgcccgccatcacacccagcaatttttgtatttttggtagagacggggtttcaccgtggctggtctcaaactcctgacttcaggtgatccgcccgcctcggcctcccaaagtgctgggttacaggcatgagccacagtgcctggcgaacactgtccttttcacattgaagtaagtgtgactgggtgtacgtttcagagtgcacagcatgtattcagtgttgttctccagtaacttctttcttaccttgaagcactctgtgtagtacttccgtttccttggcccttctcaacaacttggaccccacacatcactcagggctgttcctcatcagctacaggtttaacctggcagagaagtacaatgagctgagatggcagctcaatggcacagtgacactggagccacctgtggaaccatgagtcctaccttgactacgacttccacaggcggagccgagaaaacaataataggtgggaacctggactcctaactgacgccaggcagactcaataaagtaaaccaaacttttaaaagaaaacaaaggagaatgtcctaaggatcttgggtagacaacggtgatctaagacacaaatgcatcaaccataaaatctaagactagccatcataaaaagcttctgctcatcaaaaagattatagagtgacaatacaaagtaagaacatatttcagtaaaaatatgcaacaatggtcttccatctagaatatatcaagaatttctacagttccagtataccacagttcgcatatggcccccaagaagagtatgctggaaacttaatcccccatcattctgggaggtggggcgttaatgaggtgattaggccatgaggctctacccccattaatgaatcaatgctgttatcgtgcgagtgggttccttataaaaaggtgaattttattcccttttctctttctcctctctctttgccccttggtcagggaatgacacaccaagaagaccctcgccagatgccaaccttgtgatcttggacttcccaacctcaaaaactgcaagccaatttctattcattataaattactcattctgtggtattctgttacagcagcacaaaatggactaagacacggtaagaaaaaaatccagacaaagcaatttttagaacaggcaaaagacttgacaggaacttaagagaatacccaaatagccaatgaaaaggtatctaatatgcaccaggaaaatatagattaaaacgtgctgaggttctactacaaatgcaccagaattgccaaatgcagaggataatgctaagaattgccaaagctgtggaacacaactcccatgcgcagctggcaggagtggaaatcggtacaactcttctagaaaaccaccaggcggtttctaccaaagctgagcatgtgtatcccaatgggccagcaatcttcttctaggtatgtgctcaacagacatgcgtgtagcacatgtgcaccaaatgacatgatcatggcagcagcatccctaacagctcaaagctacaaatcccaaatgaccacgcacagaatgggtgtataatctgtgctatcatcacacaatggaaccgtacacagaaatgaactactccctccctccctcccatgaggagcctcctctattcctttcttttcccaagctccagacccccattaccccactatcatcccttaacaccacaggcagcatccacctctgggccacagaagacgaccctgagcaaacgtggcttaaggctccaaccctgtcaactccactcaggtgggctggggtgtgacactggccctggaaggctggtccaggcagcagctgggttctagccccagctcaaccactttgggagcacggccatcgcccagtcagctctggcccctacacaccatgggaggctcaacttcaaggagggtcaagatctcctctgggtccagaagatctcctctaggttcagttctgtccaggaacactgtcaccactcagctctttccccaggaactcggccacctcccttctttcatcacagccccacactccttccagctccttccactcacacaaaagagcacctgggacttgagaggcagcgcgcctctccacgcagcacagacttcactttccgagttctcctgccaccgacctgacgtggaagacacacttggcacaaaaggaccagacaaaacccagtgccagtcaggtcggcgttgttctgagaaggcagagagaaaaacagaaactgagttgtagcaggggttaacaattttatatccactctggcaagagatggctcgttccttgtgcactgtctacgtatttccctatttcatccctggagagtttaaatgtccagaaaggtttcttccttcccagaccctcttcatccttccccctttaaatggtcatttctgccaagaatcatctgtctcgctacttcctgctggtccattaattacaataacaagaaataaccctgcagtgatgtcatccaaacttttacttcctgtagcgaacgcacaggtcaggccaactgatgtgtgtgtccagatgcgccacgcctccattttgaaaagagaaaaaattcaccactcttgcactccatgaaagcttttgtgtgtccagaagcactcaccccaaggttttataagttaaataaaaatgaaatgcgtgtcaggcaccgctaccaccaaaatgtcgctattgtaagcggaaaacaagccactgattgtgcagagctgtgaatgtaggtttatatacataaagaaaagccacattttcaagacacatgtaatgagatgcagggtataagacacattcagcgtttccagcatgtgtgagctggggaagagttggtttctgcagagttggtttctgacatcagcagggataaggcggcacctgttggggatggagtgactcccttatctgtgttcttagagcaacaggactggagacggggaaggaagaacccccatctggctccaaactccccgggctcgcagaaagggctcactcaccccctcaccaggcctggcagccaatagtaatcggtgtggttcattttttgaagggatcaaagaataaagccacatccaacagcacattctggaaagttctgggcttgggattaccaacaaaaagggctctctgacacaaacaactgggagcctgcctaaaagaaccctgaaaacccaggtcagctgaagaaatcacccatgaaaaagctgggggcaccgtggtgatgcccaccccagctgatgcccacgggacccctggccctctgcctcccgtgttcaacctcagctcacctctcatttagtccaaacggggccaccatttggagtctgttctgtgatttcagcacctggtattcaaagttatcttaggttgtggcttaagcagccaagtctgacttcagattcagccctgggtggtgctgatggggggaggtgggggctgctctgaccccttcatcacaattcccataagaacctttctcaggccgggcgcggtggctcacgcctgtaatcccagcactttgggaggccaagacgggcagatcacgaggtcaggagatcgacaccatcctggctaacacggtgaaaccccgtctctactaaaaatacaaaaaattagccaggcatggtggcaggcgcctgtagtcccagttactctggaggctgaggcaggagaatggcatgaacctggcaggcggagcttgtagtgagccgagatcgcgcctctgcactccagcctgggcgacagagcgagactccgtctcaaaaaaaaaaaaaaaaaaaaacctttctcatgggaggatgggcttgggcgttgagatcaacagaggagggaggttctaggacatatttcctaggcgaagataggtccaagaagattatttttgtctacagcctgctagaaacaaggtcttatcaattattattgattacaaagccacttcgtcacctcaaactgcctgttctgtggcaaccccaagattgttctacttccacagcctttttttttttttaaacccaacacacactggccatttcctcacaaattctaccagggttgacttcaaagtgtcggggggaaagtgctgttttgagttgacacgaggtcacagacaagccaagctgcgatggttggggacagctctggaggcggagcaatcaccggatcctgtagagatggccaaagccaggaggacttcttcagatacctctagggactcatgactctcacccagggcttaatctgacccttaccaataataatgttctttctttttcctgctgtgttttcctaccattcattacaaattttagaccaatcaaaaaatttggaataaccaggcctggcacggtggctcgtgcttgtaatcccagcattctgggaggctgaggcgggcagatcattttggggtcaggagttcaagaccagcctggccaacatggtgaaaccctgtctctactaaaaatacaaaaaaaaaaaaacgagccgggcatggtgacgagtgcctgtaatgccagctactcgggaggctaaggaacgagaattgcttgaacccaggaggcaaaggttgcagtgagtcaagatcatgccactgcactcctgcctgggtgacagagtgagaccttgtctcgaggaaaaaaaaaaaaaaaaaaaaaaggtggaaaaaccagcccctgatgggccaccaggagctttcgggagcctgcccgggatatcacccggctccaccatgtgtgacgctcctgctctaaagtacacggaggacacagggcacagcgcctttcacagccactggctcacatgccagtccacggttcccagcggtggcggcattcctctccagggaggaaaatgctacagaatattcaccaccggtcaattcatctgcccggttggatctccttccaaacttaaaatctagggattcagtcctgcgaatgccatactccgcattctccttacacagattgagatcaacagtgggttggtttcaataagatatgaagaaacaatgaggcaagaccattttgaaacagcccattatacatacagaaaatccaatcaagccttggctacaaaaacagaagggtgggccgagcactagcatgtcattaattattaattctcctgtaatgtcccaatatggactaaataacctattcccacaggaaaatgtattgtcattgacaatagaagaccaaaatatctataatggttgctaatttgaatagaatcagttccacgcttaggacaagtgactattccaatggagagtttatttacaaggcattttctcacatgatgcagggagactgatttagaaattgcaatcctctctcctgtgatgaaaaccacttccacgattaagcactccatggagaagtacttacttacaagctttcctttggattctgaatgttttctgcagattttaaacagagtcggctcaccctccattcctggtaaccatgctaaatggtttcgatactgtacctgagcatttaagtgatcctgtcaaataaaacgttcctccaagttaactccgctgtatatttatgcacttaatatcacagcttactgcaaagtgcacaaatcattttaacagagtataaatttaactaccatgaaggcattttatactctgtttaacttcactgaggggcccatattttttggagaagataaatcatgcttccatataacttgacttaggggaacagcagtcaaaactcacaaagagaaatacacccagtttccttggattaggggtaaaaaaaaaacacacacccacaccgtcaaccaagacatctgtcacccgtacctcttaccaagcagtggtagccaccagtgcacccagcccagggcaggtgggctaagtgaggggctgggccatgagagtgcactctcctctgcccctggtcactgtcctctggccgttctggaacaatggggattgagcgctgtcgacctgacaacacccctagcatgggagggctgccacctgtgccatcttggctgtcatcattggaaacacaatctcctgtggatcttttctaaaaggagctccaggccccactgccaaagggtctccagacgcacataagaaatttaaaaagggggaaaaatagtcacgcaagaaatccatgcatacagcagctgaagtcatcaattatttattgaatgagggaaccttagccatggcccatctggaagggccagacttaggtctcaagctgtgccctgcaggtcaacagcaggagctcttctgacctgataggagtctctgaactcaactcagggtcacaggagtgcacttttaacgttcagtggaggcaactgcacatgcgtcacctccacaaattaagggcacagcgctgcctcccacatcccatacccagacctggtatgttacgatgcacaaaatcatgtacaggacttaaaaaaaaaaaaaaggagattgagataatagctttacagtggagaaagacggactcgatcttagccaagtgatcaaagttaaccccaccaataataagataaattcacatgatgtgccctcctaatccgctgtgctgacaacaacagtgggtcctgagcattcccgcccaaagtgcccaactccaatcaggaaaaaacacaggacaaactgaactgagggccattctacaaaatgactcatctgctctcttcaaaaacatcaatgtcatggtacaaaggaggacaagaaacggttccagattaaagatgactaaagagacaaggaaaccagaggcaacgcagaatccgaagtttcttttgctataaaggatcttattgggactactggcaaaatcagtaagatctgaatattagatatgattatcaatgttaatttcctgaccttgatacttgtcttatgtgaaagaatgggcactgtgtttaggaaaaattaactcctccatccctaaatactttagccttatatatttgcaaatatctcagagggatctgaagattatatactctgtgcgtgtgtttctgtatatgagagaaacacaagcaaatgtggtaaaatgtcatttggagaggctaggtaaagggtaattagaaattctttgttccattcttacaactcttctgtaagtctgtaattatgtcaaaagaaaaagttaaagggaaaaaaaaaatagacatgaatggccacagtgattgtgttcaagttttagaatcaagattgactgatattttcccagagaacccaaatttttgcaatgtgatttcattactctttaaggtaaactaccaaaaataaagtaagagtcacagcatgtcaggggcgcttcagatggaaagacaggcgggtcaggcagggcaaggtcccaggcctccttctgtctctgctgttggctgctgcagaggaagtggccaccgagaacccaccctgtctctacccaggctcaagtatccaaaccccaggccagcatggtcagcgctgcccaggggcaggctctgtacctgctgctgtgtgccagagaattccacacggccacagtacagtccagaaaccagccagaaccagcccgtgggcaagggaacagacctgaaagtcacaaagcttggcgtgccctccctgatggcccaaggtcagggctggccacgccggagctgggggctgccctcctccccccaggcagcctgtctctgcaggccggctccgggacacactgtcttcaaaatccccatccatgctccttacagccagtggacagcctcgccttggagatgtggccagatgggctgcctcttaagtcctcgtccatgctccttacagccaatgggcagattcaccttggagatgctgcccttctggcctctctctggagaagacaaaaaactcagtaacttccccaaaaagctcctgctttatgtactgaacttgtacttcccactaaaatcaattattaataagatttaataggcctcttgcctcaggtatcatttccagctaatttttactcccccatgaggagagtatggtggctgcacaagtcacgtttgcacactgtatccatgatcattctgccagctttcctcttttttttttttttttttgaaacagtcttgctctgtcgcccaggctagagtgaagtggcatgatctcagctcactgcaacctccgcctcgtgggatcaagtgattttcgtgccttagcctcctgagtagctgcgaccacaggtgcacgccaccacacctggctaactttttgtatttttggtagagacggggtttcaccatgttggccagggtggtctcgaatgccagacctcaaatgatccgctcgcctcggcctcctgaagtgctgggattataggcgtgagcccctgcacccagcctttctgagaattttcacaggacatatgtccagcaggcctcggcattaccttctactccagaaaattcagctcagaagccaatgctccaggagagggtttcccagagcacaccaagcaagatttaagtgccctctctctctgagccagcacagggtccatctctctggggggttggtccccaccagactgcaagtactgggaggggatggttatccccttggctctgcagccagcggctgctgcagaacacgtgttggactaaataaagctagacttaaattctgccttcacgtcgcaagtttacatctgacaccaacaacgtaagaccaccagggccagcacgcattctcaacatactttccaaagctggaaaaaagcacagccaagtcactcagaaaagcctctcttgatttggcttctggataaaaaagagtctccctgtcgtgccagatggggtcaactactcggtgaaaacagaggcccattccacaggcaccactgctgagcctctgagttcccaggacagggctgtccgaggacacaacactgacagccatgtgcagacccccgacctgggcgaggataccgccctctgagactcagtcgcctgtctacaaaaaaggaaaagataccacattaccgtgaccatctagtctaatgaaaatgccaccaggatcaaagaccataacgcaaagccctctgtttgcaccttagtccgaacaagcacccaggatacactcgctgttgtttgtttgtttgttttaaggcaggatctcactctgcctcccaggctggagtgcagtcttgacctcctggactccagccgtcctgccacgtcagcttctcaagtagctgtgactgtaggcacgcaccatcacacccagctaaagttttttttgttttgtttttttgagacggagtcttgctctgtcatccagctggagtgcagtggtgcgatctgggctcactgcaacctccgttccctggtttaagcatttttcctgcctcagcttcccgagtagctgggattagaggcatgcgccaccacgcccagctgatttttgtattctttagtagatatggggtttcactatgttggccaggctggtctagaactcctaatctcaaatgatctgcccgccttggcctcccaaagtgctaggattacaggtgtgagccacggcgcctggccccagctacgttttttgattttttgtagagaagagagcccactatgttattttattttttgtagagatgttatgtatgttgcccatgctggtcttgaacttctgagctcaagcaatcctcctgccttggcctcccaaagtcgtgggattacaggtgtgagccactgtgagcccagccggctgctgtttagaagtgcatcacaaaggatgccttgaggggcttggggaacatctcagggaagaagctgcacggagaacggtccagtcatccttctatttcgagccaacagcagccccgtggaaggaaaggtgactaaatgagaaggaatgtgactcagagggaggcgctctggaggcctctgtgcctaccccaggaggggctggcctctaggtggagtccctaccagtccggaggctcccgcccaaaccttccccatcctctctgggaagggagggcgtgaggaggtggtcccctggaagccacctccccagccctgaggttcacaccacctcagtctcaggggtccgggggtggccccagttaaaacatgggtttccagaccagtgaagcactcagaagcacagcccttctccttgcccgttctgtgtcccctggcagagggtgggtctggtatctgtgtagcaggtcctgaccccacccaagcagcagcagtgtcccagcacccccgccttcctgacccaccggcactctttcccaccaagacgccttgagatccccaaaacacgtctccactgctgccccaagtctgcccccaaaggtttggccttcgccacctgttactgcccaggcttgacacacagccatgagttccgccgtcgccacgtcagcagatctctgccaatgtgtgcctgcccttgaacatttcccccagctctaggcaaacaaagccctctccttagcaacagctcactgggcaaaacccaaagatgacccgacctggcgcacctccagcactccaggtcttggctcatgaccatgggactgcgacagaaattaccttcaaccctcacgtcaccacccatcacccaagctgcgacaccaatacatcagcaggagaaatgaggcggattgcaaacagctgccgagttccaagataaagagttttattttggtggctaaggggaaaagtagagaaaagccgccaacatttttaccaacagcataattatatgagagaaaactccctcctttaagattcctacgctgccctgacagcaatttaagcagctgagaaaagatggtgaagacaaagtcattacggcaggatcccgtctccttcctgtacacacgcctgactctctgtaatgacaatgaaagaaagctctgcgggcatatggcaggggagccacctccgtgtgcaacagcagttgcatcaagtctttagtgcaggatttagctgtcttaaagatcctattaaccagagacaatttccatcccaggctccaggcagagctgggagctttccttcagaaacgagggcgaagaacctccaacagtaagttttctgcgggcgctggaacttccagcccaaagccttcagcaaatcactccatggggaaatctagtcctgtcagctttaaactggccaccttgcattaacagggactctcgcagctggggtgtgggtaatctcaatgcacagctctgctactatatgagttcactcaaatgatccccttgtttctgctcttatgccttccaagccattttccagagacacccaggaggattctcactggaaactgaaatgtgatcctagcccagtgtctggaagctctccagcaacgcccagtgccttcgtggtcaagatccgggtctgccctcacagggccacaaccgcactggctcctgccctgggtacagcccctcggcctccagacctttccccagatgccccatggctggcctcctcctgccacgccaatctcagcctccccacagagaaccactccctgtgttctcaccaaagggtcccctcagtccaaagtatctctctggtcttaatgtttgtgtccccctgcaaattcctatgctgaaagcctcatccccaaggtggtggtattagagggtgaggcctttgagtggtaattagatgatgagggtggagcactcatgaacgggattagtgcctgatgaaagagctcttttggccaaggctcggtggctaatgcctgtaatcctagcactttgggaggccgaggtaagtggatcacctgaggtcaggagttcgagaccagcctggccaacacagcgaaacctcatctctactaaaaatacaaaaatttgtcgagcgtggtaaactttgatccagcaatccctgtaatctcagctacccgggagactgaggcaggagaaaatacaaaaatttgccaagtgtgctggtaatcggctgtaatcccagctacttgggaggatgaggcaggagaatcgcttgaacctgggaggtggaggttgcggtgagccgagatcacaccactgcactccagcctgggcaatcgagcaaaattttatttaaaaaaaaaaaaaaaaaaaaaaaggaagatctcatttgacccttccacatagcgagagagtaccgtctctgaaccagaacttgggccctcatcagacatcgaatctgctggcatcttggtcttggatttcccaagaattgtgagaattaaatttctgttgctatgagccacctgcttatggaattttgttatagtagccaaagcagactaagacaacatgctctccacttgacactgagaaagccaggccctcagggagggggctccgcctctagaacacaagttcagtgggagcgcggccactgcacctgcggatcctgaggaacagtccacgacacacacgtgcgcccacacacacgatctctgaatggatggatgactgagtctgaagagatcatgagccagccctgattcttcagccctaacttcaaccttgaaaggaaaatttgggcaatttctttctttttttttttttttttgagacagagtctcgttctgtcacccaggctagagtgcagtggtgtgatctcagctccctgcaacttccaactcctgggttcaagcgagtctcccgcctcagcctcccgagtacctgggattatagcctgccaccatgcccggttaatttttgtatttttagtagagacggggtttcgccatgttgcccaggctggtcttgaactcctgacctcaggtgattcgcccacctccagctcccaaagtgctgggattacaagcatgagccaccgcgcccagccaagggacattacttcttaagtacagaagcatcagtgaaggtcagtggcatgatgcgctgggccgtcctccacaggttattataaagaagacatccatgaggacgaatgtccacacctgccaggaaacactcccccagtccccctgaagggcaaaggtctgtcttccaaagagcctgggcctgctccttttgtcattctactggcccaacacccactcacatgtctctcatccccccacttagtcctcattttctcgagtccttcagtttgaccaacaatcagaccccacatctaggagtgtgctgaataactcagctttgtttaagcacaagaggtctctgggatgcttcaacgccgactcccacagcatgccacaacatgccttgtggccaggcggcctgactgcagctcacagcatgtacatgctctctctcactggtggacagcttatgtggctttacaaattttcttgatttacaagaactgtgcttccttgtctcccaacccagttctgccctctggaaccggttgcctccccatttcctggaacaatactccaaggacaggtgcttcttctctgggctcagcagcctcgggtgcctgagttactttcctgcaccgtccattcccacctccttcggtgagctcttcaaatggtcaaggcacagctcacatccggccctggaatctgacccaggacgccagcccacagagaactgtccaggatgcttgagagcctatggagccaccaagagctaaactgaaaagggacaaaagatcacaggagatcctgtcaagacaactgtaactggtacgtactgtgcgtcggagatactgtacgatgtcattcaagaagctcacggaacagcactgcagtcggcaggagtaacaacagaaccaggatagtggaaggaagttggcaaggggcgtggaccgctgtgggggattctaaagaatgaaaaagggatgggagcgggatgacctgtgcagttagtacagatgataaccatgaccccaaatcaagagttataaacatacaaagaatgtctctttaccactcaaacgatgacaggaggcatcaaggcagccacttctaatacccgccatgcaaactgagggttttctttgatgctgctggtcatcactcaatcagcctcagagcatgccatttatcaatcaatgcaatggacaagctgaaatcaccccggataacctcaggattgatcactattgctcattaccttctgaactgcagggaatgagtccacatcacctgaaaatgtctctctcctggaaattacacagtaagtgtttccgttggctagaaatcaatagccctactcaacgcctaacaattgagttttgttaacgggcatacaaaaagagggcgaagatcacacccttcatacttcccacttctcaccactgtgtaaacccacctgccttcaagaactgcaccaaattcggagacctagttgggagatgaatgccccagagctctctgtcctcccaaagagagtttcattatcagttcttccaagccaaagatcaagatgagataaataccaaacagaaccatttcactttcttcatgcatcacgtgtgtcttttactctagctgggattcacaaattcggttgcgaagatataaaatcagtatcagagacacaaaagccatgttctaatttctttaatagggtaagaataacatctctcacaagtatatttgtcacttatgcctcaaaacaagctgcgacctacatagtatttcagagccgtatgacatgctgcaaacatttttttactttaaaagacgtgctctcgacaataaattttaggcgagaataaaagttgcttttttcataagtgtaaaggaaaacaaacattaccaatgggattttgtttttcaacatctggagattctaaagtaccagaggttgacacaaaaactttaaatcaaagtaatgaaaatgcctgacagaatcagtgaaattattttgtgaaagagccgaccaaactggatgacagttgaacttccgaagtcacggtgtggctcagggggagcacaggtgtctaggggaggggtcaacctggagctattaaaggacccttttgtcaacctagagcctccaagaacagtttctggccactgtttgggctgtttctctttctgagtctacacatttgcaaagtgtgcagatcaggcaggcacagctcaaagtggctgaacacacccagaaggaccagccagagaatgtaagatgtgcaggcgagagcagctggggagaaaaggatgcttccaggaggcggaagctgggcagcttccaggactgaactacacatgcatttcctgcagagtcctagctcaatccttgacacacagcagggacttaataaatgtctgctccatagcatacactactagtatttgccatccagctgaccaagggaatggcctaatgggtgggaccatgtcacaggagggttctcatcttggcctctgttggctcagtttcatatgcccctcccctggaagtctgcacactgatgttgtccttgggaacacttccgactaggctgcacccttcgtgtttgctccactggtgggaacctgggggccaaggggccccagcagtcagcaccaatgcaatagtccttgaagatcacggccaaagctatacttgctctggacaggtaactccccctttcatgggcaggggtggtaaaaggagcaagcagaagcaaaaaggaattttcctctaaaaacagaattgctgaaaggcacttaatagagggataggggccagacacggtggctcacacctataatcccagtactttaataggaagaggctgcggtgagccgagatcatgccactgtactacagtctgggcgacagagagtccctggctcaaaaaaaaaaaaaaaaaggttggggggatgggatttggctgaaacatgaaacagtgaaatgcaaagaatgtatcataactgaatatgtatcataaactgaattacagacttaagatattttatgtttataaatgatttcatagaaaaaatatggaataataatggttatttaaaaaaaaaaaaaaaagctgaggagggccagcgtggtggctcacacctgtaatcccagcactttgggaggccaaggtggaaggatcacttgaggccaggagtttgacaccagcttgggcaacatagtgagacccgacctctaccaaaagtttaaagattagctgggcatggtggcatatgcctgcagtctcagctatttgggaggctgaggtgggaggactgcttgagcccaggacgtcgaggctgtagtaagctgtgctggcactcaccctggacgacagagcaagatcttgtctcaaaaaaaaaaataaataaataacaaaacaaaacaaaacaaaactggggagatgggggaaaataaccaaccacactgacagcaagttggcaaagtgcttacgtctccaagcactggtccatgtaatttgcaggtactaagtcatttatcctttacaagcttataaaacaggtactattattacttatatttaaggaggaaattggcgcaaagaaaagatcagccattttcccaatgccacacagctaccaaaggcagaggcaggaattgagcccaggcagctggatgctagcatacatggttctgccaaaagagacaattgaaaaaacaaaggatatgacttaacacaaaccaaaaccatagtaagtacagattccacttaggtaaaatcctgggtgtgcacacatgcccaaaggcagtaagagggaaagaaaagtattggagaggcctactggtctgcagaggtatctatgcacaatctgccatatcgaatgggaatgcaggagtaacaggactcctttcggtaagccaacacagacaccctccgtatgctcagatgcacttgtacgtcctggtaaaggcaaggagaaagacagtatctgaggactggggagggaaggtaatcagctctgtcttcgtaaatcttgcattgcactgttcccctcttcaacaaatgcatgattcctttggaagcatcagggtgaccagctattttattccctatttaaaaagtaacataggccaggtgcagtggctcacacctgtaatcccagcactttgggaggccaaggcaggaggatcacatgagcccgggagtttgagaccagtctgggcaacacagggagaccccatctctacaaacaaacaaaaaattagctgggcatcgtgatgcatgcctgtggtcccagctatgtggggagctgaggcaggactgcttgagcccggaggtcaagactgctgtgagctgtgactgtgccactgcactacagcctgggtgacagagtgagaccctgtcttggaaaaaaacaaaaaaacccaaacatatattcattacagaacatttggggaggaggagtgggtatggaaaaaaaaatcacccaaaattctaccaactaaagataatcactatgaactgctcctcatcagctttcccccatgattatttttatggttctattcataaatgttcaacatttgatattgaagcttttcattttaagacaagcattctacttatttcaaactgtgaaggcatcatttgaaaaagaattagctgttttcccactgttggatgcttgagtcatctgtctttttgctgtcaagtaacaccataactaaaatcttggtgcattagagctttcttggcattgggtggggaagggagattactaggtcaaagagcatggtttccttgtctgaagattctttttttttttttttttttttttgagatgaagtttccctttgttgcccaggctggagtacagtggcatgatctctatgatctctgctcactgcaacctctgccttctggggtcaagagattctcctgcctcagcctccctagtagctgggactgcagtcacgtgccatcacacccagctcatttttgtatttttagtagagatgggtttcaccacgttggtctcgaactcctgacctcaagtgatccatcctgcctccacctcccaaagtgctgggattacaggcatgagccaccactcccagcattccttgtctgaagattctaatggattacttcatagtcacaatctatgacagtaacttatctaaccttcttcccacccgccaccagcaagtatgtggggacagatctggacagacacacacacgggcatggcggcctcatcctacagggttagttccatagtagcaagtcaggccccgggggcagtggagtagaacagagtggtgccatcgggaggtggtgacgtcaccaggcagcaggtgtcctgtctctggataagcccatgttgggccacactgtttcttccagaacgtacccaatgtgggcactggcttacgtttaggagcaacgacttctacaacatgcccagttaccacatgagagcgacacccagtgagatgttcacacaaagcatggcacacacagcgccaggaaaacagcccgccttctagagtgggggggggcagcacgtgcttcctgagtttaacggtggcccatggcccatctcaggacccaacaccagccccaaccgttacgtggtgcttgaatggcactcagaacgcgcactcagtgcccagcgactccagaccccaagctgaccgttctctttactgcctcagtatctcagcccccttcatctgcactgtccaaagcctgctcaagtatcagaagctgtttccttcgtcagatccatcctgcgtgctttctacatgagcatctttaacctctaatgctgggctgaaaacaactcagtgttttggaaagttaagttttctactccagcaatctgagggtggggacatccacaggaaccctgcggcccacaaggaaaacagaaggcaggcttaatcactgaattctcactgaagaattccagcggccaaatgtcctttctaatcctgtgtgctgttctgagagaacattctagccacttctttgtatatgtgaaaaccactgcagcaggtcctattttgggcagattttccacattaaaaggcacaatggttaaaatgatcgtatgatacacctcccacccacgacactttgtttaattcaaactcaaataccaaagcaggagagtcgactgtttaccacacttgaatttataaatggccttcctgcccatcacccaggctgccccaccccctcccttctttcgacacagctgggtgggaatgcagtgacctaatatcactggacagataattccttgccttggggaaagactggcaaagcccacggcatctgccatttccaatctactcctcggaatggtaagtaggggcttgtgccaggacgctcagggggcagcacagaacgcgcgcaaccgtggctggaagtgaaaatgtaaaaaccctcccacggcctcgctgggagtcactgctctgcattggaaaacccgggtgtttgattcaactaaatcatctcaaagcctgcactggagaaaataattgaattaaagagttgctataactcattcaagtgagataaaaaccatccagtgggaggcgagacggcaaggcaaagacactgctgctagaatgtgccgtcttcttgagattgcgaggagaaacgcaatataatgtggttcaaaggacagatgggactttcctaattgtccccagattcctagcagcaggggtggtaactaaatggtttcaattaaaagttaaagaaacagaggaaagcaggcggtaagttacgcctggtgctgataagcctcattcggatcagtctcagggatgctttgtcctgatttcagacagccaagtgtcaatggcacacaagtggtggagccatcccaacatgtcaccctgacaaggtgacaaataaatctgtctgtcaaatgcactgtcatgaacacccatgtgagcatcatggagccaagcaccaggcatgtggcgacggctcagagcagggcccttccatctgcaatcaaggagaaaaagggacggacgcaatcgctagaacacagcccaaggaagcaacgatgatgtgggggttacgcacctcagggaggacgctccacctctgacaacggctacagggtggtttccgtgccaagcacggtatggctcaagtacagtgtgacaagggccatggaatcaacttctaccccttcaccaggggctctcaagcaggggacactgggccctatctggcgacatctctggtcatgccggggtggggagggaggcaacactggcatcgggtggggagaggccagggatgctgttgaacattgtatgatgcacaggacagccccccacaatgaagaaccaccagacccaaaatgtcaacagtgccaaagtagaaactcctgccttaaaggaatcgtaagttgaagtctctgaagttccaaactagaaatgctgagaaatggctggggctgattaccggcaattttttttttttttttaaccaacataggacataagcaatacgctgaaagggacaagtaagtgcatcaaaaaagcagaacagacgacgagcatgggggtgggctccagcctctgaagaagcgcggaggaagcaagtgtggcagggctgggtggcgctgtcctgcggatgctgattcagaagaagctgacccacagccaagtgtggctgaggtggagctgagaacaggaggtcccctgaggatgactgcagccccatcttttagggtaggtctctcaacacactcacaattcccatccatgtcactgctctgggaggaagtttgacacacacctagcaaacagatcttggaaaaaatgaatccctaaatgtgagaaggtctctactgacaaaggcaaacagaggggcgtagggtcccagaaagccaaggtcaatgcctaaggctctgaatgcaaatactcagcatccaccagcccaaactcagaaggcagccccagctaccaccaggctgctctggagttacgcagcccagccacgcttccaagggatgtggtcaaaacagaaagaccacccagcaaggagggcaggaggagcctcatctcaccacagaaaaagggacgaaatgaacctgggaacagctccgttggtgttaggggtcaccaggccccaccaccaggaaaagacaagaacagccactaccacatgctctgaggacgctagtccttctggaactgtgggcctcagaaggaagcagactaagatgctccttcttcccaccaatacaccccacgtctgggtggctcctgatgacttttcgatgttggcagatgttttgtgatgtcctgacctcaaaactaggtgtgtacagggacagggcctggggattcaggctggagcagacgctgagctttgcagacagcacagtttctgtaggaagtagtaggtttctcactgtttacaaaagctctgtggtgactccaggtttaggctaaagatgaccccactcaggattcactaagccttgctaaggcccaatggtcatgaggtgggaggcaggggagtccttgcctctgccaggaagtcctgccaagtcttcaccccctcggccctaacgcagccgtttctaggaagccctatgaactgtacacccaaaggcaaaccaggaagggagcgcagggagtgggggctcatctcctttccctccactccttaatacttagggggttattcttttgtcccctttgtcaaacacaaaaaaagcaaaacacagcacgcacatggttgaaataagacatgtttgcattcttgttctaagaactctggcaacaaaatccgagtactcaattatgtagccccactattagttaacacttcattactatacttcgtatttccttttcgtctttttttctgagagtaggttaaagagaaagaagacagtgaactttgctgaacctaccccatggggaaaaaatgtctccaagttatgaaaagtgaaaaagaaaacaaagatgcaaaataacatagtgataaaatctctgcatgatttgagactatcgcctcatgaatctaaagctgactgatcaatacttcctatttcccagctcagaagtgggacaacatcgctactcgactaaacagatggctaaccacaacccagtaaaccccctccctgccgaaacagttactggacaggagaatgcaggttatagcacgtggtcatttacaaaactaaaaggtatgaaactctctgctgagtcaggttgcctagacacagctctaacacattctgtcacctaagattatcatatacattaaggtttaaaaaaaagccagccagcccaggtaagaaatacaaaagtctacacggcatgaaatagctcaaagagacttgtttggtggaattaactagtggtttaatgggggggtgggggggagatgtctgatatacaagagtgccccaatttcttccgagaaattaacatttcaatcctgtttttatctagaagtcattaaactgtgcaacatgaattattggaactgtagcagcgaattaactctattcatcaactaagtccaaacattttagagtgtatctgtaatgaaaaaatagctctacatttctatctcttctcattaaagtaaaccagttttccctctctcagtatataaaactgtcttctcttcacataatttatattaccataagctggcacacattctaaactattacatgcctccaattaatttttgcagcttttgcctgaaaatttaatgagatagtagtggatgaacctgctgactccagattatgtgtgtgctcccaatattaatgttggcacaataaaataatctgatccacacctgactcaagcatttcccctcgctggggtataaaggtaatatggaaaccaggtccgctcatttcagtcttttaaatccaattacaaaatttactagtctcaaattaaactgctcctactcatcaacctgggagaaaaggagaaagcagcagcacagtctaattatcccaacaccatttctatcaacactgcagggaacagttacaatggatgactatttgtctaaggcctcagttctctaccgtggagaagtcacaagccgcactcctcaaagccaacccaaggaagccagcgcaacccccgtgatgagtacagggtacaaggaagcctgttctctgtcccgctgctacaggcgcgccttaggtgcatgcctcacgtggggtccataccattcacaatttgtacacgtgtgcatatcagtgtgtccatgtcagatgtatgtgtgcacacgtgtgagcatgcacacgtgtgagcatgtacatgtgcctgagttcagatgaataggtgaggggcattggcaacttgaagtctcaatgacaggccctctgtagttcctactttttgccaaagggttgaggtacaagcagaaggcaaaaaaggccgacgaggctgggagcagtggctcacgcctgtaatcccagcacagcaccttgggaggccaaggcaggtggatcatgcaggtggatcacttgaggtcaggagtttgagatcagcctggccaacatggtgaaaccccatctctactaaaagtagctgggtgtggcggcgggcgcctgtagtcccagctactagggaggctgaggcaggagaactgcttgaacccaggaggcggagatcgcagtgaaccgagatcgcaccactgcactccagtctgggcgacagagcgagactctgtctcaaaaaccaaacgaacaaaaaatgccaacaataccagtaacagcagcagcagtcagtaatcaatgttcaaaaagtgcctgctatccccgttttcttttttgccaagcactgagacggtcccagccatcagtccacaggtgtgtggacccagcacgtgttcagctcttggagtgaacggaatggaacttaggcagactactccccaaattccattccctccctaggctgctaatgacaatgacacccacatacactagccctggtggctgagaatatagtaatatcaagagaatacacggtacccagctgcgtctggtatatgcgtggtccgtaaggcatcacttggttgatgtgtgtttaacagcccttaggaaggccaggacctggggatgagcgggccatgcttccgaggatgggggtttatgtccaaagatggccagaagacccccctatttgtacctgtgccctgcaccttcacagtgccaatgacgcagcctggggctgctgcgggtgaacagagagagaaatgggggagggggagagagagagagagagagagagagagagagagagagagagagagagagacagagagagagagagacagagagagagagagagagagagagacagagagagagagagagagagagagagagacagagagagagacagagagacacccaggcctcggagctgcccaccctgtgctactttagcctggagtcctggctacagcaaagaccaaggggctcaatctgctctggggccacctcctccctgcgccccctccatccccaccactgggtgtgtggggaatggaactgcaaagcttacaataaactcagcaagctcacctgactgagcatttaccaagccagaaagcctcctttccacgcgctgtcggtctgcaagcatggagtctagggagacactgtagaaaagccatcatactagcacacggtcaggcacgttcagtacgcacaggtttataccaacatctaaactattttaggaaaaggctgtggagcagaacatgctgggtgtgcaactgaaacctagacctaggttcaaatctgacgtctgttcttgccaagtgccaagagaaatcaattaaccccccttatccatcaatttataggaataaaggtaaatacctcaaccttgtaaggctgtgccacacacataggaccaactcaagctgtgcagcgtctggcacgcatgccacatgaggcttcctttccggggcaactggctggaccattctgggccctccagattaaaagggcccttttcaactctgctttcctgaccagagaaggcctgggacatgagccccaagctccaccactcagccctccccccaagttcactgaaagatacccccatcctgaactccaactggagccatctctctccactcccttttcagggggcagctttcaaagggtacaattcctcactctcaataaagcaatgcttcctgccttagaaaaccatcaacaagtttgtatggaaaataagctcttgagttgtcaaaaacccatggctaaaggagaacccaaatggtgccaagctaccaggggaggtggcacctccaagagtggcagaagggtcccaaggactgttcaggtccacggtctctttctctggacccatcactccagccagtctggtccaggctaggacggagtagggatgggggtgatagataagaccaggtctggccagccaggctcttcccagaaccaacacaatcccagcacactgtggccagaagcatcctcaaaacaggactttgcgcaggctcagattcagtcctaaggcaccagaaaaaacagccttaaatttgacactgccaagtcctgggggggcggacacagaaggtctcatctagatcacacatagactctgaaaaccttctcatattgaagaacgggagctattaactgtgttaacggcatgcacagatgttgtctacatctaaaaattcccaaatacatcaattagcatattataaagaatttacttccattttcccttgacagatcataaagaccaaaatgtaacgctcatgtttgaattgacaagtgcgtatggcagaagatgctgtattaaatgcagacaacagtgaaaaaaatggtatttgatgattggccacccaattctcagagtacaatgtcaaaagccagaaatccatttatttagtaaccaaagctcaatatcacacaagtcacttgggctctggtaagggaagttctaccatctgcacttggtaattccactgttccgctcatttcctaggtaagatactgggagcatgtgtggaaaagcaagacaaggctacaacccaggggcaaatacacgtgcacacacgtacacaaatcaaaggaacaaacatttttggaaaaaaaattttttaatttaatttttaaacaaaaataaaagaaggcgtaacaacattcttatgtgctgaaattctaagcatgtctttatttgtatgtttagaaaggatccttttacaggaaggaagggctggaggagataaggatgagaggaaaaacgcgaataacataaaactaaaattaatagatgcagagttgtccttcttcccattcttccagaatcctcttcctagattgcaaatcaaaatctgcatttaaatagaatgtttttagtgtaggaaagaggaagccctagggtacaaaggtattgcattcaggatctatgggcacaatactgtattttaaatgagatgaagacttttgaaatttactgaatatatgacatattccaaactgtcttgttattactactatttttactaaattcttctatcctaataggtgtttctcttttatggccagaacttttaataaaagtaatgtgatattacatcattctatcaattaaatcttgagaaaagattacacgatccagggatcttataagctgtgggctctgataattccagccattattcagtgtgaaattcaaacagtctgaattcattaacattggttgttacaaatcggcatttttagactttgccataaaatgcaggagtccagacccagtgacctgaatctaaccgcctttcatgtgaagtggccgtgttcccggcctctcccagtgtggctctcgagagaaagcctcatgtcttcgtcctctccatggctggcctcaggctctttggtcacacttaatgttcaggcaaattgcagagacctcaagccatttaaaggagtagagacatgttcccagggaaggatgtccattacgaaacagatgtccaggtgggcataggagcgggtgcagcagcatggtgccagcacctcgccttggctgcggctgggatcagcacaccctcacaactaaaaccccaatgcgtgacatttgggaaaggcttcatggaaaccccaaacctttcactgcttgataggaaaacattattaccaggtcgatgggcaaggagtgagcaacccacatcccaagtgccaggtggaagacagaaccttcaggaacacagcagaccttcacgaccaagaaaggtttgagttccgttcgtcttgcatcgaaatgttcattgcaacatagaccacaggtaccggcttggagagatgcaacctgtactaccttcccctccagcccagccaggcgagcagggcatctcccacatgctaagcctttggctgtgtgcatttactgctgctactgcagcaatcatctttgtgtgtgtacatatattcatggggtacaagtgcaattttctacatccatacattgcattgtggtgaagtcagggccttcagtgcctcgatcgctgaaacaatgcacattgtacccaccaagccacctctcatcagcctccctcgtcagtccccataatgtcattccagactcagcagtcattcttgactaagctcttaacatgtaccaggtatctgttaagccccgttcagtactgtttcattgaatccccacaactctgagattaagcactactacctgctgcatttgcaagagggggaaactgaggcactaggctcagaggggcatagtttgtccaaggtcaacaccatcagaggaggacaaggtcaagttgtaaacattttttggccataccatgaggactctgccctcctgccatcaccaaggccaggaccaagtcctgtgcaattagaatcattaccttccccttgcaaacatcaggaggaagtgccagagccgctggggctcctggagggagtgactgttatgatgcaattccatgctaaagaattcttcctggccacatcaaactctgcatcaatctgctctgtttaaacacacaggcagagagggctttccggccttcagcaggcctctgcagtgctgccacttaagcccagggtttgcaggggggtggggatcagagcacaaatcaatgttgagtcctccttcccagaggaagctgtcgccctgtgtcatggtttagaggtcatcttctgctgtaatgagggagtggcagtgagtttcaattgaattacaaaaagccaggagtactgtactctcatcaaagtgaaggttttttttaacaaatgtgggactggggccgtcagttacacatgcaggaaacaccagcttccaggcctctgaaggtgagcaaagcagcagccaccatgctgggtccttgaatttgatacagaagccatctgagctttgtctcgagggacccaggcctacaggacttgcagagccagtgggccttcttgctgtcctcatcatcccagcttggatgtagtcaggttggctgaaccacattatccctcacctacgaggctgccgcaagagcagcacccacaggtggcgggagagtacagctgggtccccacaccctacctgcatgggtttagactccccgccctacttgcacaaaggagaggcgggggcatgacttcacttccctgcggtggaaagctcaagaacacggcgtgattatctcagaacatgcacacctcccctgaacaggtagtataacatgctgggttgccttctgtctgcagaaaacactcccagctaacacagaaccaacccagccttccagacagctgctgcgatgcgctcctacatgtgcccagcccactccacacccccctggccccactgcagcctggattcattcattcaaaaaattacttctggggcatctacaatatgcaggccatgcacagaattaaggggacaatgagctcaaggagctagctctgcttcagggagctgcggaaatcactctggaaggttctaagttcgtagtcagagtcctgctccttggtccaagtccatttacaacactttttaacttcccctgatacaggaatcagaaggctcagggagtgagaagagacacccttggctgctgcactaagagggactgaagactccctccagacaacaggccacccaggcagagggagcccaaatgctcacaggaaagccaaccccaggaggtacagacgcttctgcgacatgcagaagagacaaagtggcctcgagcagctggagccaaggtctcctaggacgcaggccccatccatgccccccaggcgtcccaccaccgcggaagtgggtgatagggaggactcacttgccatgaccagctgaaccaaggggtatatcctacaaacctgcagtgtccgggaaagaggcgagcttcccccaggaaagggggcaagcctgtcccacagctctgggaccctcctgtaagcaccctcccacccctgctgaagagcctctccccctacatccctgaggaaactgatcacccaagctgaatttttcaaggagttgcaggttacaccctacccacgacaacaaaggtttcctttgagttaaacaacgtatagctgaaccggaagagggaaggtgaccacgggaaaggtgttgcattacaaggctcaggaattcgataccttcaccaccaattctcgttttccacaaatccctattaaaagacagcacggtaccgttcccagaaatcaaggctcacaccacgtggagctgactggatgctcacggggacattcgatcccagcggcctggagaaaggacggaacaggaggaccctgtgcgggcgccattgttgttcatcagtatacatttataaagaaacggaaattaaacactgtcatcagatgctctgcactgctgctcatccacggctgtgttttttcatcctcccacattaacatttccccctaatgttctatctttttgccatatataattaattttaacagcttctgcaacttccccacaggttgttgctgtttcttttaaacagtatactgctgagaaattgatttgtttgctccgcgtgcctgaagaaaccacattatgaaatatgtataaatgtcactgttcgggctgcttctcaggataagtgcagaaaaacgttccattttacctccttacacaggagtccactcacggaggctactcgcatgtattacccgtgtgctcacacacaaatgccgatgaattacgcagcattttctttgaaaacctcctatttatccttaactggtacaaggctaggggaatcatcttaattgctacatggaaagaatgaattgcaaaagcattcagtcgaccaagaagactttatttttaacagcatggggccaggtggaagttgccaagtttgccaaaaataaatgaatcaaccaatcaataaagcaaatgtgttcagctggtgttaaatgaatgcctgggaagaaggaagccacagacagcacgtccttctttctccccttctcccgcccccacccctgtgaaaacaccaggcccgaggacacgagggtcatgggaattctcagccatttcctaaatcgttacttttatttatttattaatttatttgagacagggtctgcctctgtcactcaggctaagtagaggggtgtgatcacagtgcactgcagacgtgagctcccaggctcacacaatctggccacccaggcataggcaggcgccgccacctggccgagttttaaaaacattttctggagatggggtctccctctgtcacccaaggctgagtgcagtggtgcaatcatggcttactgcagccttgacctcccaggctcacacaatcctcccacccagctactctggaacctgaggaccacagatacacaccaccacctggctgattttttaaaaaaatttttttatagagatggggtcttgctatgttgcccaggctggtctcaaactcctgggctcaaaggatctgccctccttggcctaaatcattactttagaaaatgcatccaattatctgctccttcaacaatggtcaaaattcagatccagatactaaatcctaaaattactgaaagtaaccaggctcttgcacttctgagctattttatcagcatttgtagctgggggagctgctctaagttgaaactaatgcccctttacacttgaacctggcagatccctcaagcttcagtgaaatgctgtgtgtccttccataaagaccaactgaaactgcttaaaaccaagacatttttttaaaaaaaaacaagttattggtctaatgcattctaagagtattaatacaatcagcaatggtaacgcataaatgttaagcaaaaatatttacagaaagaaataaccttttcctctgccactaatcacacccagcaacacttgattagtaagccaacattttaataagagaaagctcacttccctgcctactcatttgcacatcggcatctacgccccagcctgaaacttgacagtaaacacaatgcaccaccactcccttcaacaagtgaggctctggccctgccgctcactccatccactccttcccactcttcttgcctttaacaaacacacgctccaagcctcagagaaatcagccgctgacccgtgtctctggctgtcccacacaacagggctgccatccctcagttcagtggccaggcctgtctagggcacaagggggtctccaccagggttggctgatgaggggtagcagaggcccattctctgcacactgccacactctcagcggaaagatgcaccccatgtgcggccccacttcacatggaccaagtgctcttcctcccacaaccctgggtgtggggacggtaccatgacaaacctgagaaagcttccaggaatatcaaagcccccgggaagccatcttcactgtaaagggaccctgcagtgtatgggaagccaggctcactaccacagtgtttccggaaaggcttccaccagcaagggacgcggggcgacctgagtttggggttgcttcatcggctcctgaatgccagatatacctaaggccacacatgctggcaggtggatctgggcgtcaagttcttcactaacaaaatgggggtcttgggaagggtatgaggatcacggaaagagaagcggacaccacgcctccatttcccagcataacgtcactcagtggcaacagagactcctggccccgccaagagtgagaggcaagtgtgcccaccatcctgcagatgccctgctcggaggtacccctccagcgaaggagcaactcagcaggaacccacccaggccggccacacagtgttgacacatgggtcacagtgggaaaattcaggccttctgcctggtctcttcctccctactttgcaaatccactctgatgagaaccagcagccagggtggcgcaggaagcggaaaacaacagtaacagcagaaagccagactcaccaggagaatggagggcgtgacccctgtgtgaccctggacccatgtagatgctaaagcaaaaagaaggggaatggacggggtgatctctccatccctacttgggaggccacactaggttgctgagatgctcaggagagaagaacaaacactgaatcaatgcctcccatttatccttggggggtggagggaggctgggattccgaagcataactcacatccagaaggcacaggaataaaatccaagcaagaaccaagagcttcagcgggggcccctcctcccctactccgaaggctggctaaagcttcgctggcatcttccccactgccccatctcagcctcctgactgtttctcacctagagaaccccagagatgaaaggccctgtggatcttcctctggtttgtggtttcggatgttggcagtcttgcttctggcccaaacactggagcaggatcacacggccctagcaaaggccccacggatgcatgcaggccaggagctcaggaggccaagggcccgaaggactctgggggccacacactgggaccagagtggcacagtggccatggcgccaacacctccaccacttcacaaccattgacaatcggaccccaaggtttaggtatgtgtttccagagtaattcaatactttccttctgtttttcatggaaaaaagatatctgtcctgccagaagcaggctagaggaccaatgatcaggaagatgacctcaactaggtggcctgctacagccacaactcagatggaaatccagcctagttcccacagcagatcaaggcaaacccctcttccaccaccaagcacactgagtttccagcactgtgtcacctcagactgtctttcccagaggccctggtcggcaggccaagcttctacatcatcctggagatctgtcaaaatacataatacagcatgcatggcagccggaaacagtcctatctttgcaaaaccacagctgcaactattctaccaccattttacgtaatataataaaagttaagggatttgatttgcattccccctcatttatgagcatttaaccaaaaacactttttctgtgacacttttgttaaaaaaagataattgggtactgctgcaaatattaatgcttaacaacaaaatagtactaaaaaaccatgacccaactgaagtgatggagaacgaagtctttttccaggagaagccagcaaagccatctggcacattgagctttcattctgacaaatagcaacatacagaacagatagtaaaagcagaacatgcatccgatctaaatttagcacgtcactattcattactgagagaacgagcctcttgtcaggagaaggctgaagtgtttgacgtcaagttactaaaaaagacggccataaaccaaaatattaagtctagcacaacaggaatgggatgcttttaaaattaggacatgctaaagaaaatactaagagggcaaaaacgatgtataaatggctctagggcctcacggattcaccattacctctgatggtgtcacgtgattttcatctacctccttcttctgtgcccacattttaaaagatgtgtctagaccagagatctcaacaggtgggctctggttgaaatccatacgtggtccttactttggttacaatcccacatgacctccttgtgttgctgcatgtagacagcaggcagagctggatacaactccctgggcatggtgacgttccacagagcagaaagggtctgagagcaaacacacgccttctggggccatgtgagaattccaccatgagagcatctgcaagtggtcaggggagaagttttatcctgcttctggggtgggctgggcggggagcaggtgggccagtggggccacactcagtgtgtgcgtgggccgtggacaccatgagctgttgtcacagcacagtgaccatgctccagtgatggccagctccagtaccacaccaagtctcttaagctcttccaaagtgctataaaaaactcttacccaaaaggatgccaaaaatacaggaatggtgggaaccccacataagggtaagtgtcttgagtctgcttagcactcaggaaacatttgttaacaggaagcgtgtcacaatttcattctggttctggatgcatttggagaatgttaactcatctgtctgagagggagatcactgctaaacaggatcccagagtggctctggttattagactgagtcaaatgaaagtgtcctcattcaaccatttttgatatttaaaaagtccatttcatccttatacaccaagttcccacatccttctgtttagagaaaatgatttccaacactgaaatgagcatctatgaaacgtaatgatggtccatccagcggagatgctcccaggcaggcagggcctggtacttgtctgggtgaaagagcgtggatgtccaacatggccagttccatggtgtccaactggaaacatcaccatgacccaacccactgaaaacatctttggacccagcacccaacactggaactatctttgccaaccccaggcccaaggtgactttgtctctgcctgagaaacccgggcagattctagcacacaggtctgagagtgagagccagaaaagtaagcaacgtttgtcctgaaaggctgaactgaataaggttgcgagtggcggtcctgacctccctcaggtttccaccaaagaacattccatcagacttccagttcctcatcctcctcaatgctaagagccttaagtgttcaaagatgactgaggggcccctctcatacacaactcaactcgagcttcacgctctgctatggcctttggcccagcaaagccctgtcagagcactcccaggaaagggttctgaatttctacatcaaattcaagcttaaagggtggggagggtcctgggtaccagcccaatccacctgttcgattcacagataaggcttccgagtgccagcagagaccacttgctcagtcaccaagctggtaagcaatatttggaggtctaggtctgggtcagctacctcagtttccccagctagatctactttatggagaaaaggaagggacacacagagatcctttcctgatcctacaacccactgtgctgcttaggttcaggcagagattcagcttggccccctcaggtggtcacccatgtgtgcccctgggctccaagtctctaactgcctccagcaactcaggaagccaggcctgagggcctggtcacaaacttaaacctctctgggaaccaaagctagtcccctcaaggctctgctaggagtgtgacaggtgagagagacaggacacaattggctagcggtttcccttgcttttgaatgatgttgttacctcacggggaaaacatttttttttaaaaagcaagattaaaatcaattccatcagagaagttgccactttgagactttaagaaagatccaggttttgtgaaaaatggctaaagacatgccgaaatgaaacttagaatcccaaaaccctgctacgggcacaggattgaactccatccatcaatgagtgtggtagggattgaatgctcatctcagcctgcacccacattcccaatctactccgccagaaaaatcatggtatgttcaagacatcctagaggctggtaacactaaaagcctaagctgactgaagaggtgccagtatccacaagccgccttcttcctaaagacatccatctatcacttatgactgactcggggtgtcatgagatggtttctctaattcatttttattctttttaattaatacatcgagaaatcctaacactatttccattctgacttgagtttccttgtagcataatttccgttgacttatctctatagcagcagcagcagcaaaaatcactttacactgaactatattgcttcagagttaattacatgtattttgcttttgataaatgaaaatactagatgcaattaattgaaagacaatcaatatgatcccacgattagacatcccaatgaaacagccagaggctgcaggcaatccatactcatcaactaattgaacacacattgcaaaggggattctagaaaactgaacttttacctggagatatttcacaataactcaccaatataaatctgtccacaaactctatagttcacacgatgggctgtccgtctttttaagggaatacaccttcattggttcaaaaccatttaaggtgatgaaaccctgaaagcaaaatgaatggagtcagtgaagatgaagtagagattttttttttttgtttacatctaggcatcctttaattgcatttttccaatgccttcgactctaagctaccagaggttattaaatggtttcattaaaaatactatttgtcttgctttagtcacacaccagatcaaattaaacagtagagcaccagaacaaatgaaccctttccatctattttgacacaaagccaagtgtgcaaaagcagaaggtgatattgtgtcatcaccgtgaaaatgtcatttagctttctctacatctccaagtagcaagcaaagggacaaaagaatcaataccttcaagcaaaaagtattaccaactgttttgagaaatatggaattataaagtgcaaatcatgagcccacggtttataagtgctattagcataaatgctgacaactgttaatctactgtaactctgattaacggttgcagttgtccattaatagaaggcattttaacttactactgaaattgattactcagttaagaattcaatcctaatgttcaataaaattgcactttcttggcaaatgcaatatgaaccgaggtgatgcattaaacagaactcccatttattttactctacatggaacagagaaggaatacatggtgggacccacatcatccgaactacttcctatgcacacacagctgtgagagaagagagcaaagttcctccttctgcggctgatggggaaggcagacaacctgtgcagcaggcatgtccaggtgtcctttctacggcttttccaggaagaaaagatggaatttaacactggagttgctatgtaactggagagcccatgtatgaaggtagtcttgctcgagccccacgagagagggaagaggcacactctaaagacatgagctgctgcagccaggcctgacattgccaaccccaccttacaaccaagtttcaaatggttaatatacaaaaaggcacgaaccacattcccagctgcatttgactttttttttttttttttttttgggagaaagagtctcactctgtcacccaggctggagtgcaatggcgcgatctcggctcactgcaagctccgcctcctgagttcaggcaattctcctgcctcggcctcctgaatagctgggactacaggcgcctgccaccacacctggctaatttttgtatttttagtagagatggggtttcaccacgttggtcaggctggtcttgaacttctgacctcaagtgatccactggcctgggcctcccaaagtgctgggattacaggcgtgagccaccgcgcccagccatcattctacctttttcgttttttttttttttttgagacgtagtctcactctgtcacccaggctggagtgcaatggcgccgtctcggctcactgcaacctccgcctcccaggtccaagggattctcctgccccagcctccctagtagctgggattacaggcgcatgccaccatgcccggataatttttgtatttttagtatagacgaggtttcaccatgttggtcaggctggtatcaaactcctgaccttctgatctgtctgccttggcctcccaaagtgctgggatacaggcatgagccaccatgcccagccaacattctgctttgtaaaccattcaaatcttaggaagctgtagatacctaaaagaacttcccctcttttaatggggcttttaattagcaatggggctaatctcctaggatccaatcccgtgacaggcattttcctgcatgattatgtagcaagtcataaagaagaactgctacactcatggtttccattcaaaagaaaaccatgctccctgctgtttccactgaattcaatgagtcctccgacagccagctcctgctccacacctagaaccaagtcactggcaggaaggactctgaagaactactcaggaaaagcatggactctacagtcaaggttatcatgtacccaaggtcaagtagtaattcactcccaactgtacaccacactgtaacccacacctcttaaggaagtagatgggagacagacattccagcctcagaagtgttaggaagggagggacaagcatagcttttcagtaatcccaagcctatagtgacacaagcatctaacagccaaggaactatttttttgaggtggcagagcttgcctggcaaactcctatccacccttcaaaacccatctcacaggttatcttctttaacatcttccctactctagctggcaggctactatataccctgcccatctccaagtctctaaaggttaaatgccttttacttaatcacattttatttatctttgaaacatagtagggaatcaaatatttaattaactgcaaaacagaatttatactcctgattagtgttgcttgtcttcgtatgtcacaggctttctccttccatttccaatggtttacacagaatttccaaaaatataaagggattgtatctattttcaggaagtagtcccttttggaaaggaaggagggatggaaaaggaactggggaggtgcaccttagcaatgactataacattacttgtttttgaacaatgtctgaagacaaacgtagcaacatgttaacatctacctaatcttgatggtgggtacaggttctaatttgagatatttcatagtaaaattaagtaggaaatagacaagtctgccttgtagaaggcttcacagaggaggtgacatttcgtggaatttcaagccgggcgttcaagcaactgtgctgcctgtcccagtgaacggcgacagcttatttagtggaataagaatgttaaaaggcttggaagactgtcagaattttaaagcaagtgctcgttgttacttgaaggtcaaaagaagtactttaaaaagactggagctacagaaaagctaaagattcaaaaatacttgtttcagcagatacttgctgacagtgcggcgtggactagtgccccgaggattcaccaggggatattttcttggcaggatttctctaagaacttccaggagtatacaacgagacgcagaaatgacttagctgattaaaatcaccactacttctgaaccagcaaccgcaggagctgaagtggcctcagcgtgtaactgccggtcagcatgcccaccccctccaagttcacgtggctgcttcgggccagacaggggtcctatttctggcctgtaccatcaacctgcgtgaacttattaaacatcccgcggcaaatgtgatctgcctacagctgatgacaggggggtgtgtactctcacacatcccagaagagaaccgcagcacccagagatggatttgggggtgggagtcccaaccagactgtggtcagctagttcctgcaccttccacatataggaaactcacaactgaggctgcagtacctagacaggaccccctaccccaccgccactgcttgggtgttttgttcttatactaagtcaggcatacaaaaattacgttttaggtctgtagtgaataaatccttttcttagaaactaaatgagactagaacctttagaagccttcaatgagccctaaaaaggtcttgatgggggcgtctgagaaactctggtgtggctccttccaggaggactgggcctgccttcacttgaactcatagcgttctttcagaacagcttctgtactctgcatggcatggaaggggtgcccacccacccacccaaatgcagagataacagaggccaggcgagcagctcaacctggcctggcccccccatgccgcctgctgtgagcagcattcatctaaccaagtgcccgcttacctacgctttctctgcaggagggatttctagtgatatttctgccatctgaagctcacatgtgccagctctcgttaggacttgaggctttctgcttgaactcacattttggctgtctaggctcctcctcctactactgtcccgccgtggatggcgaaggattcatcacccctgcttcaaggtggggcacctcctgctgcctcctcttgaggctggccctgcggctgggtcacaccagccagagagcagaacttcagctcagcgtgggcatatattaggggagaagaaagactgatcctaaaggggcccttgcaccctggaaagccttatctgaaactgactcatggtttccacgggtctggctgaacggagcaccactgtgcgctgtgttcctcacactccaggaagcaccgttcacgtttactgctaaaaagagaaaactggaatgtgtccacaaaaccatcccttaggcgatcaaaagtttcccacaggtaatggactctgggaagggacaagggaaagaacaaggagttagcaagaattaatcccaagttccgcaggccagcatcggtggctgagaagtagtatcctgcctgtgatttggaggtaacagcatctaccttcacaggtggtcaggccctttgaaagagagaacccatggaaggttcgtcccaaggcctgcatacagcaagcactcaataactgtgtgtcatcatcagactccagacatgtctccaggctgaggccgttatccacctcttctaagaaactcatctctgcctaactcatgagataaacagttgacattcagcacaagaatccaatagtcctaatcaggtcattgatggttaatggttaggcatcccaagcgttcccctcccttgaaaggtggcctcactgccatcctgtggtatggctgtgctcagaaaagagggattgcgtaaagaaccatccagaattctgcacttctgccccaagcacagggcatggtagcaggtcagagtagtctacagtcttcgccccctatactccacacccctgcccaccacaaacatccaggcttcctcagagacctctctggactagatgcaacatcaactatgacctcaaactcctggatcctttcaacagggatttcctgagcacctactcagtgccaggactgtgccaagccccagaggcacaggagcaaaacagaaacctggtccctgccccagggactcaggaggggccaccgactccaggcccgaacccagcactcagcccccgccccactgttgcccaaaccaccgaatgactgtgccacaaggtcccaagcaaactctggggccaaggcctgtacccacgcctcacgtagagacgggtagtgtgcaggtcacagtgccccacagctggcctgaggtttctggaagcatggtgtctgttaggacgagtgaacgccctctgcctcacagacactccctcggcacccatgctgacggccttctcaaaatgggcccgtcacatgggtacccaggaaatgtcccacccttctccccacactctgcccctcctcccaacactctggcccccttcagaaggggtgacttaccatgggggtgctaaaagtgggacccacagaagccgagctgtatcagaagccgagctaaagccacagccctggggatcacgcccacccctcggaggcatccagacacagctcagataccccagggcaagccccctctcctagcctgacactccctagagcaccacggcactgcctcggggtatcagtcagtatgtgggaaggggaggactctcaatggtaggaccacaaggaagacatgtagctgtttcccagtccctgagcggatggcatggaaagtggtgccaggggctttccccacacatcccatagcagatcctcccaacgatttcaagttcaagggcagcggtcaaggaaaagcctcgggcaaaatcttgtcaagaagccaaatgctctgccccaaaactgacctgcctacagcagcatgaggcaggatggtggcccttgactcgaggccatgagaagcagcccagaggacccatgggttccctgaaggaccagggacaggcactcagctgcccgcctcctttcctgcgtaccacagtggctcctggttcacacacccccagccaccctcagtgcagtctctggccacctgtgtgtgaacacgggccacacctgtgctctcccacaaggcgacatcccgctccctggccttcccaaccctcctctgccccgactctcttcagttgcagtgaggacgcgcagtacaacgcattgtaacgggggcagtggggggtggcactgggatggccgccagctggctctgcaggaagaggtcatgtgcagtcctgggggctgctgggggtaaagacaggcatccctgagcaaacggcagtgggagatgccacctctcctcacttctcaactctgccaccgagcaccacacagtggggtacacgtgtgacccatgccctctaacaaggacttcaggctgctaccatgacagcacagctcaacgttgcctgggacggcaccccccaagcccaccatattaattacgcgcctggccagcctttaaggacaaacccaccctgagaaaggccaagctcactgggcatgaagcagtgtggagtccaagtttggttggcacatggggaaaagaaatacaataaaatgacaacgtctaccaaagggctgagtgtcagatacacactggacaggaatgaacagggtgtacccgagaggttgtcactttagcattgctggattattccttcccgagattcaattccaccaactattgcctagtaataaataaaccatattaattagcttggaaacaattatcctttattcagggaaggaaaaaacaacaaccccgaaagctaattctttccatgtccctatacagccacgttggcacagaggcacttcaggtgaaatcaacacttcattatgaccccctgatgcccaagagtctcaactctgagaagaaaaatgccctctaggcagaaactttacatacacagtctttgtcagagagtgtttatggaaattttacaatattaaatatattcagctggttttaagaatgtaaaaaggcccaacagccaagattttagaactcgtcttccaatagaaggccaaccagtggaaaactggaagggaagtcttggaatcctgccactttttaaagaaaaataaaataggatatgtttccagtgttgtctcagatgtagtcaattaatgtgaccattcccctgctctttcagctttcagcttttctagatgacagggccaacggacttgagacgagctgggtgacaaggaggaacttgaagcccttgcggcattagctaggcttctagaagtgccccatccgaagtggctccaggacggagaaataaacaagggcgtgagatgggagaatgccagatgggagtcctggcaacaactggagaaaggaacaaggaacaaattgataaacgggtgctgctgatcggggctgccatgggccaagttttgaaaggggggaagaaaagtggatccacgagcaagcagcccacacaacgacgtcattttgtgaattcaagctgcattcccacacccaaagctgcccgtgggccatggaagcagaggcagccggtgtgagcaactggacctgaggctcatggggcctggctgcacccccacacacctgtacctgagtggggcacgacagtcctacttacagacaagccaggaaatcacctgaacttgaaagagaccagtgcagtggaggcgctggggggtgggagggggggatggggaacgcttaaaatcagcctggctcagagggaagcctggccctgaggtccccgcaaaggcgcgcagctccgaaagacaagtagaaaacacatcccaactcagaagcacttgaaggtatccgtctctagtcttccatggttccacactgtaagtggacaaggcggctgctggtggaggtgcacacacccctgtgagatggtcaggaacctgccagaaggagcggacataggagatggctcactccaactggtggccactactaaccagctggggcatcctggtgtcaggctccggtcttgctttctccctgatagggtgaccaagaggggttttctgagctcctttccacagggtatcccaaggacacctgatctaacaagggccagactatatatttactataggccctacacagggccagaaggtgagcagaggggtcttcagacattcagagcacacacccataccacagcgagagatggaacctctaaagctggcaggttttaatgcaagatcccctgaccaaaagcaggatgctggctgctctgaggagtcagcgagggtgtgacccccactcccactgcggtggaaggagtgggcatcttttctgtaaacttgagattccatgccccactccactctccccctagggaatccttagaaaagtggtcaagatgtaccagaccatgctggaaaccagagtaggataaattttctcctgatagagctgtacagggatatgtcagacactatccatctcaacaattatgtatttactaaaagtatttcaaaatacttcaaagacataggaaaaatacttataggtcaaatggaaaataaactatgaaacatgtattcaaatctcacatattttaaaacattcttcagtgaatctcatttttagtatatacgtatatgcataagagacagaatagatccaaagtgttattctccatgctaagattaaaaaggatttttacaatgtgtaacataactatcatttacttatttcttatactttcctgtatttttctattttctgcaaagagcatgatttcctataatatggaaaaatgtgagctgtgagctcctgtcaggagggctctgaagctggggtgcagaaagtgagctgctgcctgggctgctttgccttgcaggttttcgggccacaccaacattgtaaagtggccccatttaggatgtaagtccctgcgtggctgctgtactacaaaggtgggttttgaaaaaagccaagtgtccctccaccctcatgcaagttcgatacagaaaaggatgttctcttggggatttcaatgcagatgtctcaattccaatagccaatcaacctgggagagaattggtgggctggagagacacagcgagaatcccttgccccagcgaggatctaggaccccgactgatgccgggaaagaggcacagccaaagccttgtcagggctcagccaaaggagacttcccagtgggctccagccaagtccttgaccacagattagactccagcaggatgagcaggaagatgagcaggaagtggcatttaaaaacaaatgaagtgagaaccaaatggctcaaagtccacagtccctgaaaaattacttacaagcgtgaccagctttacatatcaacaccatttctttttttcttttttgagacggagtctcaccctgttgcccaggttggagtgcagtggtgcaatctcggcttactgcaacttgcacctcccaggttcaagtgattctcttgcctcagcctcctgagtagctgggattataggcatgcaccaccacgcccagctaatttttctattttctgcagagacagggtttcgccacgttggccaggctgctctcaaactcctgaactcaggtgatctgcccgccttggcctcccaatgttctgggattacagttgtgagccaccagccaacaacatttctttagagaaagggtctcactctgtctctcaggctggagtgcagtggcatgatcatagttcactacagcctctacctctcgggctcaagtattcttctgggctcagcctcctgtacaggcacgggcccccaagcccagctaattgccctgcccatgtcaacactattgatcaatggactacatgtgcaatactgactgggaaagtgaagttagtaaaattaaggtggccagatatcggttccttgaccctgactctctcacattgccttcccctgacaatgacctcaccctcaaccctttatctattgcaaaaggcattacataaatgggctgcctgttctgtaactggtttagatgggcagatccatgagagcagagacagaatccaagttttatcctgcaaagctcagagaccaaccaaatggtaaggagcccttgggtgaggctgtgagtcaccccaggagagtgttctctccctctgctttctcttcttcccccaggagcccaggtgtggtcacctgtacctccctcatggggccacagcgggaagcacaggcaataccaatgcacagcgctcagcgtggcgcctggcacgccagaggcacccaagtgttagctgtatcatataccaaatgctttactcacacggcttggtgaattcgagaatccacagtcctggaaagaaaagaggcctgaaggaaaccgggttctatttaattttaaactgaattatgaacccaaacctcaaggttgggggagatttcaattgaaaatgaagagtatccttgctgtggaatggagcagcagctaaacccaccatgtacaaactactcacttttcagactctgtactttaaaaaatccatttcaaggctatgtatatcacagaaaatagcatatgaagaaactctgcaaacacagccatgaaggaagcacccaaagacagaactgaattcccgggtccaaaatatattccctctagaagcaactcattctatttttaagaattaatcacagtgccaaacgaatacaacaacatctagaaatggggaaaaaggcctgcgtcccccagaccatcagcaacaaactcctttccaccttgcgccacaccacgctgtcacccaggctcaagaaacacatcacggaggtgaaacctcccaaacagcagccccttcacattcagccaaagtgagttccgaccacccaactctgatggtcctcgatgcaggtgacgcagcctcttaccaggggaatctgggatgggagagaaaagccaaactccagaccaacctgcggcccaccctaacccaggcctgtgaaccaagagaccttccagtcctggctccccaaaaagcaaagggcacttgcctacaatcagcagcagggctggctttagtcttgattcaggaaaaaaaataactgcagagcccctaaaggacatagaaatattatctattgattcatgcgcatcaagtcactaacactgggaatcctgaactaacttacacacgtatgtaactgctcagccgcatttctgcagtttggaaagaatggacaacctttcagcatggatgttcatgagggtagcaattcacaaatgctgttctcacatgatgaacatataaatacacacaagtatgtatgttcaaaatgcagggcaagcgtgctttctgaatgaacaactcaacattttcactgtgagattagattcttgggacttgtaattttacagttttcactgaagcatgccaaagccacataggtgcaacaggccttcctcctaaagaaaccatgccagcacagccctcacttgcctggtgcaccgggcctgcaccacacgtattattattctgagagcatgagcgccaagaaagaaaaccgagactcaaaagcccaagggctgtttcttcatgtttcagtcaatgtacactgtgcaaacacatgcaacacagatgaacaaaactcacaaggtgaagggggttcttccactctttccaaaatcagccaagccaactggtacaaaagtcactcccaatacgaccccatggacatctgctgagacgcgacgaggtaagagggggctgtcgacatgaccagctctacttgtcaccaagcaagggtcctgtcactctcgggtttccatgatggatttcctcttccgcagtgttctggtctaaggctgggtcaaaaatcttccagtcaatacacagaaaccaaccagccatacatacaacaacttgaatgaatctcaaagggaattaagccaagtgaaaaatcccaatcctcaaaggcggcaatgctgtaaggttccatttatataacattcttaaatgacactggagagatggtgaacggattagtggttgccaggcttagagaccaggaagtaggtaggacacgccaactccagaactttctttgagcaaactgggtcttagaagctggtcagctgtgtctacccatgtgtgtcgaccatgtgcttcagctggggaccgtcctggccacctcaagtggatatgactataaaagggcaacggggggattcttgggctggtacaaatagagacctacccgtgctaaaattgcacagactaaatacacagccaaatgagtgcatgttacactagggatttctgaatagtatccatggattctatccacgtcaatttctccgctgtgttgctgttaccagaactctgcacaatgttacaactggagggcaccagggaaagggtttaagggacctcctgtattaccttctcctaccctgtgaattcattctgtatgtgaatctgcaattacttcaaaataagtttaatttttaaaataacagatttgtcattttttggtttatgtggtttagctcatgctgggcactaagtagggcaattcctttctttaggggatcagcgcttacaaggaggggccatgaggagctggccctgttgacactgcttacgcactcaactgggatctgtgtcctccggctccccaggggccccggggtgcatcctgtctctcgagaagccagagctcacaattcctgaaccctgaccttctctcactggagctggcagagatgctcgtgctacgtcaattctttcctgggagcgggcatgactgactcattgttctctcccaggtgctgccagctgcccaggcctcccagggccacacccaacagagggcacgttccctgacagagcagccctggaggacagaccagcagagaaaaccagcccccggggcagctctgtgctgggcaagtgcctctctggtgggtaacaacttcaggactccctgacccagtctggctaaatcgaaactacagagcaggctggaacaggccaagactgtccccagctgacatacacagttgtacgctgggctggccggcttccaacacccagcttgctcaaagaaagttctagagctggagtgtgctagcagatagccagggtcaggggagacccagagctacgcccctgcttctcgagcctggggaccttgctggtgccctcaaatgccacaccagccttttgtatcacccgaaaggtctttgtggcactctgtgtcttttcctgggcctcccctgctgcctcccttttaggaagggctggcatactcgacgctagcactcccggtaactccccgctggttcaaagaatccaaaagaaaactgcaggagcgtctttgctgtttccgcctttattatcttcaaggttccacgttttttcagttcattcgacaatttactatctgtcagcaacaataaaagtacctccatctcccaaaatgtgccactaggtacacgtgtatagataaaaaataagcagattttaataatactattttttgaaattctataaacccttaaacagtcatttaccaaaaaagctgaatcactttcaaatcatcaacattgcttagctttaaagctgcttaaaacacacacaaaccagtgactcttccacacaaacaaaaattatattctacatacattaaatatataatttgattaaacatatttatgtctttgtgatgacatttaaaatagaagtaatcattttcttttttaaaacaaaaactctttcaattataattcaaagctgtcaaaccaatcttctgctacagatcttttaaatgtcacataccttcaaaaggggatggcagtttccttttaaatatgcaattccaaacagtgccttctgaatcaagaatgtattaaaatacaccgctggcatttatctcgatgaagtatcgccctctgccccctccctcctgatagatatgtacagacgcacggcactcagatgtgtttctccccagtgtaacttgggagcggttggtgccactgccactggctgtagccacagggctcaacaccaagtcacactcctaacaccttaaggggacagaggtatcctctcatgattcttccagttttcttcccagatggcttgctgaactctgtgtaacccaatgttggcggagcatcaacagcccaatcgtaagacagcgttaatcacatgcaaaaaaacctccaaactcattctcataagtcaatgacctacatattcaattgcttatttgccatccgagtagcaaacaccatgctatatttaaacacagagcttagatatatctttcttctaaaatgctcagagagacagatataagccttatatttcagccctcttctcaactttaggaaagcaaaccttgtcaatatccggtgtttgggaatctctgaagacaacagtctggtctattctgccattgtcttagtaaggaggtactaagcatcattttcataaaaagcaaacatccccgctggaacttaagtcaattgaagcttgccttcttagcacctgacaaatagtgctcagataatggctccgagtgagttaagcatgggtcatatgcatgtcacatactcactgtcccaaaaccagtcaacagtgatagagtgaatgggacactcagtgtccaaaaaccagtcagcagagtgaccagagtgatggggacgcgaatgtttcctaactgctgtacctcggtagcagagacgacatccagcagagatgacagcaaaaacagcagaaagctcttgagatctgggctaagaaagggagccatagctcaggggctgtccctctgccagcctcttggtatttcactcaaatcagaagaagtgtaaacaagtcggtccccggatccccaaccaacgtttgttcaagggtgatgctaagaacatcggaagaagtgtcagggctgagcattcgagaaaccaaatagatgacatgcctaacccagtctcaagccaaagccagtgccgtccacctaagaagcaggagtggactgaggttgcgggaaggcaaggaggagcccagggctctggcctgtaccactagaccgcagtgcagcggtggcctgggagaggcccgctggacacacttcgcaatgggccagttcagctgctggtgctttcctgccttgtccaactatgtgacctcaggcaagtcacttagcctctcagaagctcacctggcagggtcgagaggaatgctacctagcaagacgctgtgattctcggtaacttaagttctaattccacttaaaaataggcagtcatgaaacttaacgaccaaagccaaactcaaaagtcactgggacttaaaagacatcaagagttaaggggcttctctctttgggttcaggctagaattctcttccttgggtgctgaactccgttcctagcgtatggataggaagcaccagaaaatgccatccgcaaggccaggccccacaaactgacgtgtggtacagctgaggatggggatggcaaaggcagaaagccacagatgaaccgaaatacatggcagggccaggcccgtcaatcaggacaagccacgtacttgttccttccctgttagggcagatgtgctcgcacctcccggcctcggccccagagaagctactatctgctcccctaggcgccaacattccttatttgatccttgccatcaagcttttattctgatcaccaccccccgctatacagacacacatatacacatctatagctatttccacatttccacaccacattcacatcttccacatacacacacatccaaaagagctgcgtgcacttctgatggtcaaagcctatagcccattctcagctgccatctgtcttgcctgctgcaccacacacgtgcatacacacacacattctctctctctctctctctctctctactctactctgtccatcccaatactgcatcaactgtgaacaagccaggtactattaagtaaggaaggctggaaattaaatgagacataactttgtcctcaaggagttcaaacaagaaacagccgagtgttacacgaagtaggcacggacgaaggagggatggcaactctgcctcagccccatgcacatgctctcaaatcaaaggcactccagaggctccttaccacctgccttctagatacttctgtccaactgcatgttccatcaacccctccaactctgctcacccgcaaccactgacatcactgcctcaccccttgcagtgctcatcaacaacccaaacaagcccaatcctgccctgatctcatgtctgtgtcactggaaccaacaggcctgcctcaaccactgtccacctgcacatctgagaggctggcaggtcaccggggctagccgtgcacgtcagttcctgggaagaaagtagaatgtgaatcatcttctctcaaacgcctatcaaaagcccagctgagatcaataattttttgggagaacagacctgtaccaattggctcggtgtttggtgaggtattgtaaatttgatcctaaatcaaagggtatccctagaaggacccacatggaatggcctcctctaaacatccctccatgttgtacttctgactctttccagcaatctcaagcacaagaagcagttgtgggaacccaggcctggcatctgttggcagcccatggttggtggtagagcactttacagccatcactatgccctatacgcacctccctgtggcaagctgtttccctgaaggacacacgtcatccctccctaaactcagagagagctgcccaacttaagttatctgttacagcaactgtcgtgaaatttttggttgctgtatttgcattttaaaatcaattttggccctcccccaatctcaacccctattacggcatcctattttttgagtcctcaaagaactttcctgaaagaggtaggatataaatacataaaatggaatccacttaagagaacattctagtaaccctataaaacatgcttctaaaagtaatgaccccagagacttggaagagctggctgcagcttcctgaggcccatgaggctagcacacccagatgccgggttctggggtggcccagctcatggtgaggctgctctgggagcagctgtctagaatacctacttagccaagtgtccatcctcacacggaagcaaactaggacagcatgtgctaccatgtgaccatcagtaggctccaaaagtccacttctgtcagtcatgaatgcaaaacagtgggcacagatgtcagaaagaaccaggaacacaccaggtaccaaaggccacgaccttcattcttgacttactagcctggagcttcatcagagagcatggtattttggggacaagaggaagcaggggaagggagagacattgggaggcggggggaaggaatgaaggaacaagaattgttcagaatagccaggaaaagcaagagaaacaggccccaccctaatatagaggacacagctacatcttccagagcatgtgaactccacagcccacgcccagcagagccaacggtgcagacccctgcccccatcctgctagtagggaggtgggggtcaagggagaggagggggccctacccactcaccctcccatcccactccaccacccaagcagaaagccaacgttctgtagggtggtttaaaaaatagctgacttccatacatgatcagtggaagcataaaatgttataaccactttgtaagactaaacatacacctactccatgacccagcaattccatttctaggaacttacccaagagaaatgaaatcatatgtccacaaaaagacatgcatgagaatggttcatagctacttgctcagaatagcgaaaagctggaaacagcccaagtgtccattaatgggtgagcgggtaaagaaactgcggtcgagtcattcagtggaatactactcagaagtaaaaaggaacaagagaataatctggcccaaaatgtcttaaaaatctcaaatacatcatgtgtgtggcatgaaaaaagcttcatgcaaaaaggtacatgtgtcataatatacatacatattaaattgtatgtatacatgtatatgctgtgtataatgtacatacatgtattatgtagtattacatgaaattctagaacaggcaaaactacctctgttgaaggaaaagaaaccaaaacagtggtggcctgagatgatcagggaggtgagggtggggacagcctggcagggccccaaggggactttccggagtgactgtagctcttggtagggctttggggggtacgcaggtatgtgcgtgtgttagaactaaccaaatggcacacttaaggtcatgcatttcatttgacctcatgccccttccccaccaatccccacttccctcccaacacttcctctaagttttacctcaaagaaaaaacagaaagaaccacaaacaggttgaccttaggtcatgagacccgtgctccaggtgaagatctgaaattcagccaagaaatgtggtcaaacagaagatgaccagggctgggggcacagtgtgtcctgccgaacccgggggtggtgtgcacattcattgtagatgatcagacccacctgtccggttttcctaacaagagactgaaaacaataccaagacaaccttccaaaggagactccaaaacctcagctgggaacattttattcagagcgattcacaggaggcctgtctctggaaggaggagcacagaaacacctgtgaggaccaaggccctggaggcacagggagaataactactccaagtccaagtctgcaaacagcacacgacagagcagcaacctctgcccgtgagctcaaggaggtccaggacacggtcagggttgtttgtgctaacgcaggctgatgaaacagaggaccctgcaccgaaaagggccctctgggaagaaaaccccaggacaatgacatgtgcaacatgctggctgtacagggcttggaagcagggcaaagaacccccaggtatagcccacaggatttctctctttttttttttttttcttcttttgagacagagtttcactcttgttgcccaggctggagtgtaatagcatgatctcggctcactgcaacctctgcctcccaggttcaagtgattctcctgcctcagtctcccaagtaggtgggattacagacgcacaccaccatgcccagctaatttttgtatttttagtacagatggggtttcatcatattggtcaggctggtctcgaactcctgacctcaggtgatccacgcacctctgccacccaaaaatgcagggattacaggtgtgagccaccatgcctggccagcccacaggacttctagccttcccttgctgagcctctttggaggcagggcagcccttggccacggttccccaagagcaaagtgattaccacaggtccacttggaaacacgctgccaaatgccacacgacttggacgcagctgctgttaaatgctgtgtcctataaaagtgggacttctcaatctgaagttgcgttcccagctcaagtcacacgtgggctgcacttacaagcctctcaagaggcccaagaagcttttaaagtattaagtatagaaaatacatgcaacttcccagttaaaatatagtgcgtggacactggaaaaggtcaatgcagcctccactccattttcattactgatgcttcacccagatggtggggaaggtacaataaaagcatatttagagaccgactgtactgccagacaagactagcggaactctaactcccaggttgccttgatctgaacaggttctagaaactgccaagcatcgccccctcattttagagggaggcaccctgccacccagagagggcaaagggctcgctgtccaagctggagaaaatccctgggtatcgcctccgacccactgtatctcaaatacgatgtgtgttggctcggctcttccaaaaaccgaagccaagacacgatcagctctggaagagacttcttggggaggcagacaggcggggaggcagagggagacgcaagtctgacagcagatgcagatgagatggcagggaaggcaggaggctggggaggaggagtcttcacctgctgtccccggctgggagcagcccgcagagtgcaggctgtctgggaacgccatgctggatttccactgcgggattcagaacgtagcagctggggccaccagtcactcacattcccagaagcagaagatcaggagcgtcttcatggctgccacaccatgccaggtcattgctgcaattttacagcccgacttgcttctaaacttctccaacgtttgaaaatcaggctttaagggcacctagccgaacccaaagtgtttaggtggatgccatttgggtaggtgtgaggcccccaaacaagggcagaagggaggggcagaatctacaggactcagtgaataaatgagcaagaatgagtgaagtgaagccatgaggttcatttaggctggtgaatgggagacggcgctgctttctatctaacccaagcaagtgtaggacagggagggggcagcggcgggttggaactacccaactcactgtactacttacgttcacattgtctgctttaacaaacaagcctaaaattgtgtatcagctcaacacattagaatttgatttctaaatcacaagaacatcaggctcatgttcctaatgggcaactctgctccacagagtgattcaggcactcagaatcctcccctagcacctaggcattctctgctggattttccacatccagctgacagtcaacaggagaaaaactgagcaaggcacacttgtttcttaattagtgctgccgggaagcgacacacattgccacccacattccatgtgggaactatcatggagcctccgacagatacttgaggtggtggaagggaagcagggccctttggtggacagctggtggtctctgccatactcaccttctgtctcagtcttaggtcaggcttatttcggaagcattatagcactctgggtctctgaacacaagaaccctggatgatctgaccactgaatcaaatcagaaaagagaggccaacaactctagaaatgcaactagtaaatcttctggtaacaagtggaatttcgttgaccaattcaaaagtccagcaactgcctttttgttggaaaatgccaaactctaaaacttttgcaaaaacaggttcatgttcttcaagtctaagacatcatcaaaccttagaccagcatcattttataaaccactaagggagaaaaaaaaaaatgccgtcaattaaactatggcttgtgatcaattttatgacacaacttgagtccagagatgttaaagtgctgaaaaaccaatacagtgtcttcaatgaagtcttccaacagccttgtcagaaacacaggaatggccatttcacagatgaaggcctggggttcccacagttgggggacttggcagcagtcaaacagctggcgaggggcggagttggaggaggaggatttccaaccagcctctgactcagcacctggtagagtcctaatccctgcagctgtctcccagcacacccccaaactctcaaagcccaagccaagcaccagtattcgcacatccgtacagactgcatcaaatggcaaatcaagcaccttgggtatataatacttataaacttatttgaataaaaaaaactccactaaaatatgggttttcatctgcacagcactttaccaacaaattccacgacattcaagtgagaacagatgatgtactgaaatatcaacaacaagaatccgatttggtaaacagcagagtgctattttcacatcatcctaatgaatttagtttcaataaacacaaatcaagcaaacactcagaaaattttaacagtatggcaaaatgacgcttagaatgacagccccagaagatgaagtcttttttgacaagtgacagataccacaaggagagaagaatcaaaatggatgactggatttaaagggcctgcctgtggcccacatccctgaacttggccctgcacctgcttgctaaatctccttgattgtgggggaagcagccagaagaaagctctagatccctcaatcctgctcaagctgccaggcacattctaagagcatgtgtctggtgcatggaaatccacatacagcaggtcagtgagcacccacagaagaccacacagattcaaactcttgcccatagcctccatctcagtatgaccttcagcatcaagcactgattactggtaagtatgtagagatgggagaggacaggtcaaggcagacccagcctcctcctcagacctgctcacctgcctacccatcccccaagatgtgtctcaatcccatcgtgccctgaaagtagagcccaggttaaaatctcagcaaagagtttcacaaagtagcagtgaagccaagcatgcaacgatcaggccagaaactcaaaaccaggggatagggaaacaggctcacgcgctggtggggtactctgcagccaggaggagcgcaggcagggccacctcttcggagggtgtctgagcagtccttcaatctgaatcctttgttttctccatctgaaaacagaggcttgttgtttggagggtgtaattagaacgcatttgaacacaactataaactctaaatcactttaaagaggctagtctagtcttttgaaatgactgtttttgccttggaaataataagccaccatgaacaaatttaatcaaagttgtatttacaaagagtctcaaagcctaaagcagaagtataccatctctcctccacactgtgagctctttagggacagggaagtgcctcattcctattcagccgaccatgtggaaaactacaactgacttctgaatggcaggcacttcctaaccacggctggaagactggagcagcttctttctgcatgggtgataaaatgtgtccaaaaagaaacgcacataaaggcatgtaaaacttagcaggtaggatatcaggcaagaaacaaactacagatcagatttgaaaaggacacgatcagaaggaacaaatggaaacattccgaagtcctgtcctggagcgctagttactcgctgcatgctgttctgaaaatgcaaatattgagcagccccaacgaccagatttaacaagcccatcaccaacagccaacatgaccaacatcaagtaattctgttatcattcccaactcagaggtggagagactgaggcttagagtctcatgccagagtccacggcagtaagagcagattcaaatctaggccaactcaagtccacccagcggaagcccccccgccccgtgccttgctcagcagagacaacagggcaggaggaagcggggagaaaggaaggtccatgactctgtagggaccgcctggtggggaattcaggtccctctgcttcctggccctctgcttcaaccaggggagttcacagcaaagttcttgttctgaaccccaggtagggaccataatcctaccgctcccagcaactgctggtgactcctctgagcaaagagcactctgccaggcaggaccaatcgaagcccacaaaggctggagaaccaggctggcaggcccctccttttctgcccccgcaccacagcagccccagacacgcggcgcgggaggacgaagagaacctgaccaatgagggagggtgaagcgcccagcaccctgggccacctctgcgggtccttggggaaaggagccaacagtacagatgcgtgtggccaggcctcctcccatcttcccccagcctttccctcccagcctggagagggagtcaggcatagccctccccactccacctaccctgctgcttagctcctcctgcctcctgccccctgccccctgcccccggtatactcaaccctcaataatactaaaacccacgttaatactagaacccacgttcatcccaacagccaacccccggggaccttagccgacgttcacaacctcaaaccttcccgtcataggcagcggcaaggctacattgtgcatggatgccttggtgcgcccccactcgctgcgctgggctagaggggagccccttcttgatccaggtatcactgttaggtttacttcctcctgcaccctgggaggaaaccaagtccccagtctctccctgactctgccttctacaaaagcccaaccaccaggaaggaagccaatgcccaggaatgcctccaggtgtcctttgttccctgcagcacccgctccaccaccctctctccctactgtccacaagacagcctcccacctttgtaggccaaggattcccatctgagggctccgaaaaaaatgtaaggtcccggaatcccttgagacactggaaagccagattctttttctatagaaatgcatatatgaccgtccccatcccatcccccatcgcctcgtggggttcctgggctgatcccccacccaggcaggaagcctcaagaggtccatagtctgagtcaagccctccagctttgtctcctaggcaacggctgctttctccttccagctacacatggaccaaggcaggaagatcccagcctcccttcatttctggcatcccagcagctagccctcctctccatccccacgcacacaggcacctcaccctatggagctcattccactgcattcttttgaggaagtgaaacagccctgaaagatgaccctcacctgccgatgggaagccaggccacactgggctcaccactcgggacacttctcggtgtgtggccctgggtgcccctgtgctgctctcctgcctggccccacagcaggagcgtacctgtcagtcaggtgtgcatttaagaagtcggcctcccagggcagccttctgccctctgaccctgctcccagtctgtggggcagcgaagttaggacttacctgattctccagcccatcccttccggcccacgagcagaacaggacaagtggcctcagctgaggagtgctggctgggcagtggttccctacctggttgttcattagagtcacctgggaactttttattaccaaggcagatgccactgtggaccacacactcagaacctgggggtaggattaagctgggatcttttttcaaagctctccaggtgattctcagatccagataaggatgagaacgaaggggctggagggacccaggcagggggcggcctcctaggggagggtgagctgggagggaggcccaggctggcccctcaccctcacagctcacagcctacctcctgtgaaaggccagccctgacctcagggtgcatgggtggggctccccaggccccagacacatccccctgtctggctcacccagcttgatcgcctgcccagtgttctctggttgggtggtcagctccttgcaggcaggagcaggtcaggcttgttcaggccaccactccagaaaagcatcggccacactgttcccccaccctaacccctggtgcccagctcattagccttgagttgaagaaaggccctcctcttttgtgtgcctataggagtgggacaaggtactgtggaggatgtgggaaagaaagaaaatgaaccccatggagcccattcttgcaggaattatgccctcagcaccttccaagcctccctacttaggcctcttttgctcctaaaacaaacccttgcagagaatgtgactcactctatcttcaacatgcacctactacacagcaggggccaacgaacttgaagtcatcagttgacagttacaagacaccgtccaaacgctgcctattagtccccccaaaacagcttcactagcacagggacatctaggggcagagacgtaaaacattctcccaaaatggtaacaggatgtttccctgatggcgttgcccagggccttgaaagagccgggagcgatttcaaatgggctccgggctcgtgtcaggagcaggagctgcctttggtgggacacaggtcaccaaacctgacccacccaaatcttcagcactgacatcaccgccgaaaacgagaagtttgtttacgacaaggtctcatattcctgcttgttctttacctaaaaatctaaatttcccatgtgggtccttacacatctgtatcaacaaaatcacaattcgccaagatactgaaagcaccaacaatttctgagtttaaggagaagagacaaagaaatcaagacaacaggaagaaggatgcaggaagatgtcaccagtttgctaggacgtgggcctcaggagtcaagagtcccttctgggggcagcggctgtggccaaacccagagcagagtctcgggaacccctcagccttatttcccaaggggcctgggagtccctggtgactctggtgggctggtcctgaatatcccagctcctctgtcctcaccatcttgtcaaccccaccaaggctgcaaccagttccctccaaggatggtgacctgcacatacaacatcaaggcaccgactttatcttttaaatgcacaatgtgctggagccaaaaacaaaacaaaaagcctctccaagatgctttcctgaaacacactaggctgaaaaaatggagccccatttcctcttatttttaattttacattggctgtgtttataataaaatagaataacttatttatttgcttaccttacttggaaagacaataaattggaaaggcttcataaatctcacagggaattcctttcaacaaggactgtcagcaaaaatccgtaaataaccttctgccagcctctagcaatcacctccaccacgttctttttccttcctgcttttgtactaatcttctagcaaacaaatcaaatcacacaccaaaacgtttttattcttatcgaggtaaggctcacaaaacatccggagtccactggggctactcactcacgtggcctctgagaagactcagatgcagagaagaccccaggggaccgcgggaggggcacctctgcaccctcatagccagccacgctcctctcactaacttacaaaaacagaggtggtgattagcttcagaagcggagccagagatgctcttctaacaactgcagcattaattccatctggagcaaatcatccgcaaagccctagacacacacatgaggaaacaaagtccagggcaggttgctgataggtcccggtgcctcctcccacccagacttggctggtgtccacaacgcagcctccgctcacctggctcccttataatctcagtgtcgccggagcttctggtcaagtgcactcatcctggagccgactgaaccaagggagccaacggagtcacgctgggtgattcgagactatcccaagcaacacggacctcatgcggcaggtcctgtccccaccacgctgacacttgaaaggcaactgtttgaaactggttcaaatggctgtgtttgacttgaaacacatccgcgtttggtggggctggtgaaaatgaccttcggcagttcagaaacagcggaagatggacagtctcacgctgaggtttcaaggactgtgctaaaaataagattaactaagaggcagagaaggaggctcgtggataatcaaatgtgtaagattggaaagagccgctgtaatcaatttacatatcaggaaagggtaattaccataaccaaagggaaaatttctccaagccaaatggttaaaaaaaaaaaaaaaaacagaccagcaaaccactacccgaataaatgtaaaacaaaaatgtatgtttccagccaggatgtcaaatgcctttcaggctccagaactacagagtttcaccctgcgaccttgattcttgggtgcaagatgacgaacttaagaactccaaacatacctgtgcccgtccgtctcttcactcggctaactgtgcaaaggaaccggcttctgatgagtcccactgtggtttccatacagcagctgccaaagagctgtgtgttcctgggaaagtcactgagcttctctgagtctactttgtctctagcctgtgagtggtgcattagccattactattatgcatctaccaaatacatctccatcttccctgcttggcacattcctggcactcaacagacagtagatactattagccaggcgaggtggctcacgcctgtaatcccagcactttgggaagctgaggtggggagattacttgaggccaggagttcgagagcagcctggccaacatggtgaagccctgtctctactaaaatacaaaatttagccgggtgtggtggcgcacacccgtaatcccagctacatgggaggttgaggcatgaattgcttcaaaccaggaggcagaggttccagtgagccgagattgcaccactgtacaatcactgtacagcctgggtgacagagctagactgtctcaaaaaaaaaaaaaaaaaaaaaagatggtagctactattataattattccaccaaattaatgtatttctaatattcttgaatgagggcagaggattttcttaagtggtcccctttcaaagtgatttaatactgcacacccctaaaagactgtctgccttgtttttttctcgactgttcattagcccctgttttttggactctgggagcttccagtctaggccagctgggcctgggcatgtaatagcaaaagctactcacctgagcaagcaccgctggaggggctctcaactcacttccctccaagtcagctggaatttttggatccacccaagggaagcaacttccccacccaaagtgtggagatagatgtggagccccagaagggttctgggaaagcatcctgtatccaggacaccatgaggccttgtggctgcctagaactgcgaccctactgtgctcacagctgcacatcacagagcacaggtggctggtgacctgtgaaaaggtccccagatcacctttccagacagtaaagaactttgctctcaccatccgaaagcagaccggtggccacacacattcgcaacttccactcagcgtctagcacaccccttccccaacccttgctgaactgtccctgaacccttaataaagacacgatggggtgtccacccacctttcagctactaaccccatgtacccaagtgtcctcacactacactgggaagccccgctgaaatctgctaagctatgtatgtctttggagggtatgtttccatcacactcgctgcatggcagtttgttcacagacgaccacccagaagaagccaagaatgcttagacattaatttcaggccaggaatcaaggtcacatttagtctgagctcaaaggcatcaaagggttttctcatactgcaaatgcacgcatacaagatgcaccgagatcacgggaatgccagtcagggctggccaatcacgatgactgccgcttaaacctgccctcagcctgactgatgtgatgagggaaggggacaaagaatgagctccgaaaggacatttcgggcaacgaccagaaaattagcaaatgcagtgatccccacttaacaattttataaattccaagactcatttcaagtttctcccaactgaaagaaaataatatcaagggccgggtgcagtggctcacgcctgtaatctcagcactttgggaggccaaggtgggtggatcacctgaggtcaggagttcgagaccagcctggctaacatggcaaaagcccatttctacaaaaaatataaaaattagctggacatggtggtgggtgcctatcatctcagctactcaggaggctgaggcaggaaaatcacttgaacccagaaggtggaggttgcagtgagccaagatcacaccactgcactgcagcatgggtgacagtgtgaccctgtgtcaaaaaaacaataaaaagaatattaaaaaccatgacgtggctgggcatggtggctcacacctgcatacccagcactttgggaggccgagacaggcagatcacttgaggtcaggagtttgagaccagcctggccaacatggtgaaaccccatctctactaaaaatacaaaaattagccaggcctgacagactggctgtaatcccggctactcgggaggctgagacaggagaatcgcttgaacctgggaggcagaggagaggctgcagtgagctgagatcacaccactgcactccagcctgggtaacagagtgagactctgtcaaaaaaaaaaaaagaataaataaaaataaaaacaaaaaccatgaggcaatgagtcagttgcagcttatatcccagagtgcaatagggacttcctgccaagcatctcctctgctgggcacctgggcacaagtctccagcgccttctcattacctcctcctgtgagaggaactagtgactagcgtcctatttgacgcataaggagctggcagggttgaaagtggagcccaggactgcaagcatggccatctaccctcggggccggcaccagcctcggggcagctgaccttccccacctcagaagctctcattcctctgggctttccacaaaccacccttcttgaccacaaaaaggtggccatcctgactggtctctaccttcaggaaaacaaatggggacctgagggcgctcaaccaccccagaccacccagaagtcacaggagcacggaacaggaagcagggagacagcacacagtaagcacatggcaagcacacagtaaacacacggcaagtacatggcaaatacacagcaggtacacagcgagcacacagtaagcacacggtaaacactcagcaagtacatggcaaatgcacagcaggtacacagcgagcacacagtaagcacatggcaagcacacagtaaatacacagcaagcacacagcaagtacacagtgagcacgcggcaaacacacgacatgcacacggttagcacactgcccggctccctccaaagccacttcccccacagagaaaggagaaagcggccctggcctggcagtcactcacagtccctctggacctggagccagcggctatggcggacgaagaggcacctgttcccaggcactttccaagaggggctggtgggacacagtgtggagaggcagctgttgtgagtgtccctggggagcccagggagcatggccttagatgcaccagggcctgcaggtgtggcccagaactgcccactcttgggtttgcaggggacgggggcggtttgcctactttgcggaggaggtggttatctgctggtttcagacacgactcaagactgcagtgactggcttttggtccgacctgtccagacgagccaagctcctggagtctcaggcatccctaggatggcactggggagaggaggggtgtcatccaagccaagtccatctgctgtgaccagagcacccctggggctcatgcataatccttggatattacaaatgtcctggaaattactggcctctcacaccagcatctaccaaactcctcgcacttcctaggctggcccttctactatcaaaaaggagtgatttccttagtggtggctggaggctgggagtcagggcggggaggcaggaactccataggagcacagagaactttcctcggtgatgggatggttccgcaaccacccggtggcgacgcctagatcgtcaagacttgcagaactgcatgctaaagggtgttttactgtatataagttatttctacataggattttgaaaacttgatccttctcaaaaagcaaatgataaaattaaatgacttgctttatgcagtgaactgtgaaatcctctgcggcccccaagagctttgcaactgaggggtggctgagccagcacacaccccaccaggcttccttgaaatcagcaacacccagaagacaccaggaggaaggattctgtgaagcacatgctcgcagaggctgcctgagatgcagctccgcttcagatggtttactcagggaaaatcatttcgttacctcccgtggtttagtggccaggacatgggagctgaaaggacacgcgagcttgaaaggctcctaccttgggttccctctcccacatttaccctcagcacacccccttcagcctaactccaaacctaatgtggccacctctgcccaccccagctcgcggaaatccaccactgttttgctgaactccagataaaccctccttgctcttcttccctgtagcccggcagcccccccacgacatcccgcacacagtaggggtgcaccttcattccacaggcaatgttcagaagaagcaaattcgcctcagccggccgggtgtgttggctcacacctgtaatcccagcactttgggaggctgaggcaggccgaccacctgaggtcaggagttcaagaccagcctgaccaacatggtgaaaacctgtctctactaaaaaatacaaaaattagctgggagtgctgtaatcccacctactcaggaggctgagaaaggagaactgcttgaacccgggaggcagaggttgcagtgagcggagaactcgccactgcactccagcctgggctacagagtgagcctccatttcaaaaaaagaaaaaattcacctcaatggcactgcattatcacaccatgtaacatgttgaaaccctatgtctaaaatattgtatacctatttttatttgatttactaaattctaaagcttttctaaatctctaaaaggtagtttccccagtaatgcataactgcttaatcgggaagtgtacaaaacataattacactgcctaaaactacaatattgcttatgggaatatctccgttcatgcattccactttattttgtatttaatctctattaagatgtctatgtgaaaacagataggtattcttcataaacaccataaatcataaagtcatttctttgctaactcaagtccaaaagcggccccaaaagaaactgccagggccccaaagactatcactttccatattcaagcagacaagctccttgcacagaggcctcagtgcagagccccaaaacacctagccctgggccaattagtcaggtcataatttctctcaccataaatggctctgcatgcaactcaaaaagcacccagacgctccccagaaagcagtcactcaaaccaagaagagcaattcctttctgctcaagaccccagttacaaacctcatatcaaggggcaaacagagtcccttaaatccttcttcatctaaggacacccgtggatgctctttcaagttcacctttcaacccgggggactcccaccaaaggctccagactcttgaaactggattctcctgcttcccttctggccttcgaatttgcacccacccgctcatccctagaatggggtcatgtgaatacacaaccattctctggacggcctggtattggtggaggagaaccagttcggatctcgctcgatcattaattaactgtgagcccagcctatgcggcttgccaattcctcaagtgggaaataatcgcactgcctcacaacagggttgttactaaaaataaaataagccaatgtataacaaagtacttctgcaaacagaaacaagctaggttaccagcctcgctgaagcctactaattaataaattccccgatcaagataaaaaggatttgccacaaaacgagttcactctcagttctaaaacagcaggtatcactcccaaatccgcttgcatcatgatgaaacaggctagaggcacaagtgagggcctcgggggcgctcctgaaggttaagcatatttgcctgcagtgggaagtaaatgcaccttttgctgatccatgttcttgctcacacgggccaatgttaaaaacatcgactctgtggcatccatctttgacttgtgtacatagatagtaatagtgtgcttcactgagcagttcagattttactaaaatataatctgcaaaaccaatttcttttctagcaggtatgctctgacactgcccagcctcatctcaatacacactgctgcccggtcaagagtgaaatgtcaagtgcatctgaatacggaactagctccaattttatcagacacccaggaaatttcctctgccttcctagaaatgcctggtaatgttggagggtggagaatccctcttcaaagaatgaggatgagtacagcagaaatccatattccaagtttcaaataatttagtgggttatttgagttatataaaatcttctttcaaccatttttcatgccaaatgttcaataactagactcgagtgtgtgggtgtgtgttgggggagtggtttgtttttgaagaaagccagtctgtgtgctgctgttggcagtttcgggctggctgcatcaggcaccccctggaggaggtggctaaaaatacagatgttagggcttctccatcgggacgaagggtggggccctcaggagactcctggccaggggtgccttggggacgcccctgctccagaagccaaccttttgagcacccccaaccccaggtaccagggcctctctggggactgactgagtcactcgtgaaaaccaccaagcccacccaagcttcgtagtattaaaggtatctgctgtcccttggggcagggtagggcagggcacggcagggggccagagaaggttgctagcacttatctgctccctcctgataaaacagggcacaaacagccactccctgctaggaagaagaaggcacagttgacgggaggatttgtctttctcaatgacattcacgccaccataactactgggattgccatgaatcctactactatcaccaccaccaccaccagcaccaccgtccctaataataataatggtaacaaacagctagcgtgggagcacttcccacatcttattcattgtgcacactctccaggatttgcaattgaagaatatgacattctggccccagacccctggtccctggccagctgagatgcccttgcattccagcatgggtggtttcccaagggcattttcaaggaccattttgcttttccaagtgagatttttttttttttttaatttgagacagagttttgcttttgttgcccacgctggagtgcaatgggatgatctcgactcactgcaacctctgcctcccaggttcaagtgattctcctgcctcagcctcccgattagctggaattacaggtgccaaccaccatacctggctaatttttgtatttctagaagagactaaaatataatctacaaaatcaatttctccaaaactaattagaagagacagggttttgccatgttggccaggctggtcttgaactcctgacctcaggtgactggcctgcctcggcctctcaaagtgctaggattataggtgtgagccaccatgcccggccctaagtgagatttttttttttttttggagacagcgtcttgctctgttgcccaggctggagtgcaatggcacgatcttggcttactgcaacctctgtctccagagttcaagcaattctcctgcctcagactcccaaatagctaggattacaggtgcgcgccaccacgcatggctaattttttgtatttttagtagagacagggtttttgccatgttggccaggctggtctcaaactcctgatcttaggtgatccacctgcctcagcctcccaaagtgctggggttataggcatgagccaccccacctggcctccaagtgagattttttaatagcatgagttgaatccaaagaaactgctggtccatgaaatgaccagcccactctgaaggtgacaaactaactgccggacaggcaccttccttaccccaccttgccatttcacgcacatgacctactattcacacctggagccccacaggaagcacagagcagttaacactggctgggtggagaaaagatatttgaacatttcaatcagaagacatttggtgatgctgtacgcacatgcgtactgtgcctggcccctagtgggtgctcagtcagtatctgtgaatgaatatcctaggaggacatgattaattaccaccccattgccagggcctggggtcaggaacatgctcaaacatcacagcagatctgccacccagctgcacctggtccagttaccacagctgctgctgactgagcacccacaagaaaccaaacaggatgccaccaagcaagtcgacagccctggtcactgaccggcaaacgcacccattcctcagggacctgggagggtgaagggagctatgatgatgacgtgtgcacagagggaagggcagacacagttccttttcctcaacaaatatgctcctcggaatgtggcctgtcatgcccacgttcactgtggtttatgtactgaggcctcagtagaggagaattcaaacctgagcgacccttctcaacaggcttcacctgggcagggtggctggggcagcactgggcccccaccctggctgcccatcaggcaaggcagtttttttcttccttctccaggaagagaaagtaggtcttaaatagaaagtaaatattttactgagcgtttcttggagtgacctaatacgtagtaacatcccacagactaaaattaacctcgtgaacagttttcagttcattgctttgggccccaggaatcaatgagaaagaagacggctgctcccaaactaagccagccccaccagccactccccttccctaccacagggcacgacatcttccaggtatttttaacatagcaccatgacaggcttggcagctcacacctgtaatcctaacacttttgggaggccaaggagggaggattacttgagctcaggagttcatgagcagtccgggcaacatggcaaaccccatctctacaaaaaatacagaaactagccaggtgtggtgccctgtacctgtagtcccacctacttgggaggctgagatgggaaaattgcttgaacccgggaggtcgaggccgcagtcagccgtgattgcgccactgcactccaagcctcggcgacacggtgaaacccccatctcgggaaaaaaaaaaattctaacaaacacatacggtacgtcaggccagttctaaaggctttagaaacactacttcattgaatccttacaacacaccctctccttaccctcattttacagattcagaaaccgaagccctttgcaaaggcctcccagtgtgggagagaagtccagcatttctttccatcccttctttgccacacttccttgttttgcctctactaagctctaggagggcaggaccatctctccttgggccgagcctcagtgtttgaaaggaagaaagacattcacgaccttccagtgggacctctctggtcaccagccaccaaagtgagcacagcagttagctcagtgctttcaaagtgcgctgccggggcccctagagcaaaactttggatctgagccaggaccctgacatgccaagtaaccaccaggttgcaaaactcccagctacaggcgtgaccaaaaaggtggtccatgtgctgctgcagcccccttcccactaaccacagcgaacccaggctctccctcccaccttgcccgctgctctagaaaacaaaagagaattaggaaagtaaactcctttttaagcttccttgctgagaaatattttaaaagactgctctgaggggccaagtaacatacgggatttgcttctaagctctcgggcctgactgggacacaaccagggacccaaaagcacaactgggttgagtcataacccccctcccttcatcctctacggacatgagagcctcaactaagacattctcgaatttaccacaggagtgtcttcctttgcccactatttggagccatgtggccaatttaggatagaaaaatattacccactattcaaggccttccttaaatgctgaggaagacatcactgcagacacaattccaactttaattgtgaaatctcctggcttttgtcacttgaagcctcattcttaatcccaggcttagctgagaaatgagaaggatgtgtgcaagtggaggaaaaagaatcctcaaccctgagtgaaaagcatgcgccgtggaggagcgaggagaatggacactctgaagatgctagggctgggaaacagggtgctggggaaaactggctcgctggcctcagagctgcggcaggtccaccactgcgccgtgttctgctggaggaacctggatgccagctcagtggatcttctgcccagcgcaaaggatccctgaaacctggaacaggacaggggacacaccatagacacgacatgggctctggaagaccactcacaaggcccggctcacaggaaatgaccattcatgggaacctgcacgccgcagtcattctcatgcttagatgccactttccaagcaacagcctctgagaaagcagcttcccccttctcagtgtcccagtgaggcaccacagaaaggagagggctggcccagggatgatcctggccccaccaccctcttccaggtggagtgaagtggaaggagacctgtttaaaaactgcagggggcacttaaaatgggctgactctattcatacccaagctggaggtgagccaggacaccgggactcacatgactgatttgtcaagagactcctcccagcacttccttgagtcatccacaagacagagcagaatccaaaggccaagatggaggcggggggcacccaacatccacaccacccccggccccaccagagccccagcggaaaccaaggatttccagaatacacatgtgctcacaagtgtacacacgtgttcacaaaaagaagagaagggttgtagaataggaaggtaatcttataaagaaaagcctgtttttcaggaaaaccttcaccttgtggggaccttaccctctatggaaagccaaggtcaacctgggagctcccgcatcacctgctccgggtactcttccggtggagcggggctggtctctggatttgaagacacacccaactctgtgccattccctgtcagttctctgatagcctctttgaaaagaaggctgttccctttgttcaggagtattaattcaaattcctttctaaggcccacaccacacggatgcaggggagcgacccaaaggaagttcacccggcaaaacctagtttctccctggttttcacaggagtggtgcaaacagactatcacagttaggagaaatcctaagcatcttccctgtctcttgacccccaactccccaacgtggaacccacaaaccagatcctatttcaggtgtgcacatggctccagttgaatgccagaggcaaccagagttggggaggggtgcatcccatggacccaagccctccctcgagggagatggggggtggagggcaactgagatcacactatcccagaccacaaacatggtcttacctattgatgaaatgatacctggccactaaatccaattttaccacatgaaaccctaagcactgtgaaagctacacacataaccccaggagagtgtgcccatgcattcttggagtgtggggtggtgctgcatcagagacacacagatgagggcaagggagaaacagcttgggaggaaagaaggagtctagtcttggttagtgtggcaaagccatccccagacattcccgtgtcccagtcaaaggccacaagaagcctcggtcagccacagagaagccagagccaggcgaagttggtagtaactagccagacttaattacctaagctccctggccctgactcttcattggtaaaacagtgactaactatcacctgtgcctctgcgaggacagcgctgtgcttggccagggctggagagccgatctcaaggcaggtgtctggccttttcccggacatagtgagtctgtgatccagagtctgacccacgtattcaacggggcctgcctcacttcctgctctaggatgttttacattcactgcacttttggagtgaatattcacaacagcctggctcctgtttggaagcctgaggcaggccccgttgaatacgtgggtcagactctggatcacagactcactatgtccaggaaaaggccagacacctgccttgagatcggctctccagccctggccaagcacagcgctgtcctcgcagaggcacaggtgatagttagtcactgttttaccaatgaagagtcagggcaacgcaacaacacacaatggcccagcgagctagtgccagacactaagtaagtgctcaagaaatggttgctctctagttacttgaataacaggtagagcgcacttgaatggctgcataagtttctggagcaccaaattaagtctgcaaaacatagaggcgaacacagaaattcctccatggagaagacgagggcaagacgaaacgggccagatcgcaccgtcctaccactctgcgctcggacaacctctagtcacatgcctcgccaggcttcaggtgttgggagccgccggggtgaacagcagagaacgcagcagaggcgcgcaaatgtcactcgtcctcgacgtggagttctgctgaaggtctcagtggccctcgctgtttcccacagcaactgccactgcgctatttgtactacaaggaaaacacccagattcgaaggttatccaagaaccgtggtcacccccaaacactgcccaggagacgagatcccaagccggtcaagtggaaatgatgccgctgtttaccgtttgcttgcaactcagccaccatcgcgcagtcaatcaacgaacctcaccactcaccacgaccccaggagtccccatgagtgcccggagtccgcgaccgctgcggggtggaggcggctctggcctggtgcaaccaggtccccgcccctgctctgagcctcgagtgcgggctgggggccaacctggtgtcccgcgtggtctcgaggctcctaccttgccggggcctcgcggaccggagaggggccggcgaccctgctggcttgaggcggcgtctagctggacccccgccgccccgggtccgagcggccccgcccagcacaaaggccagcgggaggaaggaggaagtgggcacggagcggggggagggggcagggcccattctcacacctctcaacgacttccccgcggcgggaagcggctccatttacaagtgtaaaggcgaggcgcgaggtgggggggcccgggggtgtcagataccgcggcccgcggaggggccagggtggggccgccaagtgccctgcggggggaagagggcacagctggggcggggccgcgccgccaggtgttctggcccgcgggggcggggcctccaggtccacccgccgggaggagaggggcgaaccccagggatggagggggcttcacctggggctcgggagccaggaaccccgggaccccgggaccccagaagcccggacgccaggaggcccgtccttgcagcagggtggggcacccccgcggtccgggaaatgcaggagaccccgccccctccaggtagagcgcggccaggtgtggcggactggcgctccccgcaacagaaggtcgcgcaggacaccggaagtcgtcctggagtcagtctgagcggatcgcaggggttccaggcgccccaggccccccacaccgcgagtcacaggaacaaggaggaaaaacagcctctttatgacttgggggaggcaattcaatatttcttcctggcataaaataggaattgctctatttacccagcccgcaggagcgtcgtgaagattaatgactgtgaaatgtttttaagatcaaaaacattcccagattttacttgtaggcacttatatgtgcatattggtatctgtacagcaaaatatactctttattgattgccctcctagtgtgacttctattccgtaatctgaaagccccgagataaaggaatcaggtctgtctctgcctgctcctgaaacactaggaaatatgggtaggaaatgtcaggtcagctgggcatctacgctgagcctctatccagtccgcagggcagatagagcaatccagagtgcggaccacagctgaacgtctggagaaagggaaaaaactttaagattattggtcaccccccactgggaagaaaacacagtatcctccccagctcattaggaggtgctcccaaagcctgagtctccatcagggtctcgggtgtttgcagagccttggctggcactgggagccaatggtcagccaagttctgcctgtgccaggagcccacgcagcccatctggcccggcagctccaacagcaaggcctccctgttccgagcagagtaaggccacatgaccgcacagaggacaatgttgggcttcccaggggtgtctccactccaggctgaacattctcagttccctcaaccgttcctgggacatggctttaagagctctctcgggccctgcccgctgctggcgctggctgtactccaggtgggcaggcctgggagctggctgcagcaacaccaagtggggtgtccaggatccagatggatttgcaagcactgcccccacccgttcccttggtctccctggacctgaacaagcagcggataagccgactgtgtttgcacttctagactgcacgaaagaccatccatcagcaaaataataaactcacagctagagctcatttaaaaggaaaggtgcacaaactcctggcctttcaccccctccagcagagaaacctcgaatgctctgttttcccctccaaactcttctcctctcatttcccctctccaccctcccgctgccacacacacacctgcggcaggtacaatactatcacttccaggttagattctggccacttacaccataaaatgattctttgctagcctcattttatagatgagatttttaaattccatcttggaaaaagaaaagccccattaggccagaggagttgatctccctccacggtctaggtcttcggttccttccagagaaacttcctcaggttccatgactccataataaagtttttgtttgtcctgggacgggacagattgctggaggccagatttcaggcatggctggagcacagccacgataagctggactttacaagccctgagcttgcttgtgctgcaggaagacctacacacactgtctctgtgacacatcctttaacgtggcccttccaggcttctgccacaacgtgggctggaatgagacacagaaatattgccactatttccagacaatctttaaggcagctgacagtttcttttagtcataattaaggatttgttttaatgcaagaagcacatttctgctgatcagaggagagctttggaggaagcacaaatcagcaatacaatggaaggtaagtatttttgtattttataaatgagaaggatttttagaaccccacggatgaaaagcccagccctccctctcccccctcacccctgcctccagggcttttctggactcacagaaggcaacaaaaccaaaggcaaggctggccaccaccaggatcaggggcagacaacagcagctattcagggttcccatcctttaaacaccaaccgatctttgggaaaaacgaagtctctattattacctaggacaaaagtcacaattctctatagaaacaaaatcatcacttgtcccattcataagatcccaaccatttcatcacaatttttgtgaatattaagccaactctaggcaaccatctgttaaatttagttaggtaaacagctaaagcagatcactttctaaaacattcactgagggagggactaggcatatacacatgcaaactacaactggttctcaccgagtgtcgttgctaaaaaaactgaacaggcttcagacaccaacaatggttaatgatctacatattatctacatattccacttaaggtgagggttagaaagtgaggggccaggaatgcacctcccttaagctacagagttggttccactttgggacctcggctcccacgtggaaggagaagggctttgtgaatgggggaggagctttttccgaaatggcagcagctacgcaaaacatgaacatccagcaaaaacttattttagctgcattctccctaatgctaccaacagattaaaaactactttaaagtcaggagaggagtaaaaataaacacaacttcctcctgtgacttaagatgcctcctttctgaagttgaatatcatttcctaaaatcacatttcgagggggtagaaaaggtctgtttactttccttgaggaactcttactatctgccgttaaaatcgttcctcaaaaaagcagattactgagaagagaaagcacacgacgttccttagcagtccagaaaagaccaccttctaagaaaaactctggaaagggggcaggccaaatctccatgcccggcaaagacggatgaatgtgcccctggttcccatcccgtccacagctcctgaagtttctgtgttctccagcagtcagaagaatgaaggcgaaactagcccttggctcccatggtcaacattccacacaaacaatggcctggctctctccctattgtacattctgtattcatttgtgaatcccccctttttttttttacacaatgtgcaaagcccttcttttcacaggcgaagttctgaatgcccaagtgcagccataatttaggctttaaacattaataatgatagctaaaagcaaactccagattatgcccaaacattaatttgtgaatatcattagagtcacactgatggcttttggatactctccattaaatcatgatcaaaagggccactgaacacctttaaaatggttcttaagtttttagcaattattaaatataattttccaaaccccaagataggattaaaaaaaaaaaaactctttcataagtctttgatacatattccatcaaacacagacttgaatgaaaattaacttcaaaagatgaggtggggaggagaagccttgcattttcccttctttccaggagtgctgtaactttaacttgcagcagcgtaaattaagacatgcttaccagctgtaagggagaaaactgatatctgccaggccgcacagtctctaaaagtgtatccattccagcatttcatgtgcccactaaaagttttcagcagggtaagttcacacaagcattcctcccctagcaattcatagaaagattgctggggaaaagacaccccgagatttcaccacatgggtcacttccattaagtacaaatacttctttttccagggacagacacactgccctcccattttttagttactacaaaaatatgttccaccctgtgtaacagacctaccatcccaaagtggaaatattacctgagctgtgccctgcccaactgataaatttcccttcccaaccatgtgctgtatgaatatatatttgtggcctgattcagggccacaggacactagggctgctgcttttccctgatagattaacagagggacccaggctgcatgcacatacattatgatgacagcccctctctatggaaatgacagtggtaaaaaaatgacaactggggctgccattctaccattgctgtaaactctttaaattttttccatttagggaaagcgttaagtgcaaagggtataactttgctttcaaaaatgattcatgatgttagtgaactgttggcaaatggcattctggtgctagatctcagcagggctactccctcactcagaggtgtccttttcggttttttttcaatccgtgaatctcaaggatttcaaatagtgtgagctgtttgtattttaacagcaatggtaacaataaaaatatcattttaaaatccagtgcactgcttgttcagtacatactatatatattcatcatttctttgccttgtagctggctactcagaaactaaaaagttgtaggttgattttctggttttgttgtttgttgttgctgtttgtttgtttcatttaatctctctttgaaacattttccagacttaaaaagtaaaatttctggagttttaaaagttaagactgaagttattgattattctctgaaagggtaactgacaaactagttaataattatacagatagcaagttttaccgtttcatcttgtgtacacgaccagattaacaatggcagggaaagcacacacaacttggcagggacaggaacaggtgtgccccgactctcaaaaggccaaaatatctcaccaagtatgtcactggcgtgttttttacaatggcagtagtgtttgtttttaactagccaaacgttcttactttcttaactttagagagatgtactttacgaatatctttctcttcacggaattgatgattcagttccacacataaattgcaactcgtgcaaggaaatgatttttagggacaatgaggctttttaaaatcagttaagaaaaggtaattcaccctgcccctccccgcaggagaacacccattcaagggtcagtttcaaagctcccaggcgaaaccgtaaataactcacagggttctgcattcaacctgcagactcttattaaggtacaattagagagggggttgtcaggtgggggttaaaaaaaaaaaaagagcgggggggagtcggtattctttaccttatctttctgaacaggaaaaagaattaaacccaaaccacctagtcaggttcaaaacaagctccaaacccaagatcttttaattccctctaataactgctttccacagggatgtaactggggtcccctacccctggggcacaaaaaaccaatcagcgccataaattccctttgccttcaaccctctctcccttttacaggggggcagggtagggggagggggtgacccaacatcaacacttacactctacagaaatatgctggcttatttcctttgtttgctcatgttatacttgatcaagtgtgaacgattaaactggtttcattaaaggcaagtgcattcacggctaacatccaacttcaatggcaactgtaagcatattttgcaagaaagagggcctgtttttttgcttgaaatctaccatctcattaacttttcttttgggggcaataaaaagggcactaggggtttttcaggagaatgtcagagcagttcagagatctgatgccagacaaaagaatatttagcgtttcaactctacgatacagtctctgctaaagaaaaaaattctgtttcaacattaaagcagctatgactgaaaatgtctaattagcattttgactattactttataattgctgtaagaagtatcctttgaaatcaagtgattacaaaaacaagatcctttaaagtctcattacttcaaaatagaaaagatttatatttaaaaaaaaaggggggggttaaaaacctcagaattctcaaagtacatgaaaactacccacttctacttggaaaaccctcgaggcaaaacagcaatcttaggtactgaacacgaggtaatttttaaactgtcttcgaacccaaacacctagtagagaaagctatcttttttgaaagggtggtatgagtcgatatatttcgcccaagttagaaaggcagaaagaatcactttgtaaacttccccaaaatataacgtcccctcaaaattatccatgtcagataaaaatataccagtctctagaatatccaacagaattgcaaataaggcgtttagcattttaaattcccaatgcatatttatagaatagaattctcttgtctatccttccagccactcgcatcagactctctaagaacttaacccgatctccaatctttaaagaaaaaagggggtaaatacacagaaggattgtttaccccggacagggcaaggaagcccggtatgacgacgtaggccattgccagcagcctccaccacgagcacgcagagcggggatttctacgaaaaattcctcctcttccctataaaatcctaaacgtggggtcctctgcagccaactgccgcttgggccgcctccggaaaaagtaccgggcggggggaggggggacaaccacaaacactcgcgcgcacacgctcactccgtgtccgcgaccgtcgtcgccggcggaaagcgagccacgggagggagtgtgtgcgcgcgtgtgtgtctcggcgcggcccgcggtgaccgagctgagctcttgggcccgcggcctccgagccccagggcgcggcgtgggctgcaggcgacccgccacgccgctgggcctcccgcgggagaaaggcccaggcacgccccggctcccgcgcgcctctgcccaactcgcccggggcgctgggggcagcgcgagggagagaaagaaaggcgcttcccctcggccgcgcggggccgtccggcgccgcggagggctgggaggaggaggaaccgcggcggcccggctgtccctgcgccgcaccgggtccctgccgcccggggcgcgccctagccagcccctcctgctaaactttttctttttgattcgccccacccgaaaagtgcggcccgggcggggaaggtgggggaggcgggcgggccgggctcccggcggcggcgggcgaggaggaagtggtgcccgcgggagcgcggccgggcagaggaaatgcccggcccgcccggcccccgcccgcgcccgccgcccggcccgcccaggccccccgccccgccgcgactttggcgggccgagccccgcgcggcagtggcggcggcggcagcggcagcagatgtggcccggctgcccggaggagccaacaatgcggggccggcaaaacaaaagggttccacttcgcctcctttcccgtctttcacttgcgctcccggggagccgcgcgggatcccccgccggcaggggcagcgcccctggggaccgagagccgctcacgccccgacttccccacggaacccctcttctccgcgccccccccaccctcgcctcgtaggcgcaaggcccgccgcaccccggcgcgctcggactcctgttccccggagatccggccgtattgtccccgcggcgcgtcgcgcgctcggcctgggtcgccggcggcccccgggcgcgcacccaccgggctcagggagcaggagccgggggcgcccagggaaccgtcgccgagacgccgccgccgccgccgccgctgccctccggacgccgccgcgctcggggtttctttttttttttttttcaaccctgatgggaaggaaggtgaccgcctacttcgcattcatcaactctcatcacaacaacaaaaatcctggcgcaaacggcggccagcgggcgcaatcggtggcgggggcgggcggggacccccgagccagcgtccacccccgggcgccgaggggggacacgaggccgggggcacggaccaaagatgtcctcggatgccggctccgcgtccttcgccctcttcctcctcctcctcctcctccctgagtggcgcagtgaggcgcgggcgcggcgcccccagcccgcggccgcaggtgaggcgggggcggcggcggccccagccctcccccggggccccccttacctcgtcccggacggtcggcgtccacggcgaaaggcgcccaccctggaggcggcggcggcggcgtctcccgcccctcccaccccacccggcggcggtggcggtggcggcggctgtgcggccccccctcagcgcggcatggctcccggttcggtccctcgctcctcgggccgccgccggctcctccgggccgctcccgagccaccttaaaatgacacacgcacacagggacacacacacaaaaacttaatctctccagctccccgcccctccccctcccgccctccccaccctccctccgctcccctcccctccccaccctacccctcccttcccttccacctcctcccctcgccgccgagcctcttcctacttccccacccaccccacccccttcctccgcccacccggttcccaattccccccgcgtcccggccccgcgccctcccgcccgccgagagggggctgcgctgggggtccccggcccgggcccgccccgcgccgcgctcacccccgagaggatgctaattccaacttggatcgggggagggaacgtcctggatgccgagcgcctcccggctatttgctcttctttatttgttttctcctccggggaaggagaaggaaaacggagagaaaaggaaaggaaagaagcggcgctggccgcagctcccggtacccgctggctgcgcaggagctaggcgggaggcgaggtgagggtcgccgctcgctcactcctcgctcctgtttttggggggggggggcaaaggcggggtctctttttgcaaaccaatgacacaaccccacatgggccggcctcgcccccttcagatactcctcactacaaatcggctctctcgggggattagtggctccgcgaaagtgcacacaagcgcggcgggcgggagggccaggggccgggcgcggcgggcactccctagcccggccccgcccgggaggccctcgggaggcgcgggggcctcggtggcaggggccgaggtcctgtcgcggtggctcggggtccgctgctcccctggcccttcatcctcctccgccccttccacgtggggtaccgggcagccggccacgtgggggaacgcgagccccgggtggccccggtcccatggggccccgcccagccagcggcgccaaccagcccccttcccggcccccgggctccaacttcctcctggtgccccgcaccggccgcttctgccttctcaggcccgcggggtcaggcgcgggccggccacagggggcacttgcgctccccaaatccagatccgggagaccgtgccggagaggcggcgaccgctgtgggtgcgcagggaagggccctctgtgctgcaagttgcagcagtgctgtgccctaaaagaagcaaaacattcttacacattgaaaaaaaaaaaaaaggttccctcttgctgcctggatctcgccggggcatttgagaagccctgtgttgggtcggagccccgggtctcgaggagggaggcgcgctgcggcgtgggggcccgcgactcggggtcctgggcttgcgcggcggcccggagcccacgccgtcctgacgtctcaaggttggagtctgcacagcgagcctgggaatccaggcccagcggccgctcgcggcccaacgagcacctgggctaaattccccgcccgtgacccgcgacgtccgagcgccgtctccggaagggagctggtggccgtggagtgtggggtcttctccctgcgccccagggccccccaaactcttctcactaccctgagttcggcgtgcgtcctccaagaatccctgggtgggctgaactgagcccttaggatcgatttgtttaaaaaccctattgagatattaggagctggattgagatgtcgagcaggaaaggagtgggaggggtctgaggtcccgcctttggaggccgcagggaccgccattccgcgaacccagccgcgcggtgtggtctcctccatccctgagtgccccgcgccctgcagagccgaggaaacttacagccagggccagggggccggaggagaggccaccgagctgcacgacccttttctgcatcccaaagagcgttgctccaggcctcccagtcttcattaaacatttcttaaatcctgccccagcccgccgcggggcttgtttgccaaagcgcaccaggtgcgttgcggcctgagcggcctgcagtggaggggccgggactatcgaagattgcttaatcactcaacaagattt
